(19) United States
(12) Patent Application Publication
(10) Pub. No.: US 2024/0110184 A1
(43) Pub. Date: Apr. 4, 2024

(54) MUSCLE TARGETING COMPLEXES AND USES THEREOF FOR TREATING FACIOSCAPULOHUMERAL MUSCULAR DYSTROPHY

(71) Applicant: Dyne Therapeutics, Inc., Waltham, MA (US)

(72) Inventors: Duncan Brown, Berkeley, CA (US); Nelson Hsia, Waltham, MA (US); Romesh R. Subramanian, Framingham, MA (US); Mohammed T. Qatanani, Waltham, MA (US); Timothy Weeden, Waltham, MA (US); Cody A. Desjardins, Waltham, MA (US); Brendan Quinn, Boston, MA (US); John Najim, Waltham, MA (US)

(73) Assignee: Dyne Therapeutics, Inc., Waltham, MA (US)

(21) Appl. No.: 18/270,284

(22) PCT Filed: Dec. 30, 2021
(86) PCT No.: PCT/US2021/065624

§ 371 Date: Jun. 29, 2023

Related U.S. Application Data
(60) Provisional application No. 63/181,439, filed on Apr. 29, 2021.
(60) Provisional application No. 63/133,156, filed on Dec. 31, 2020.

(51) Int. Cl. C12N 15/113; A61K 31/712; A61K 31/7125; A61K 47/68; A61P 21/00; C07K 16/28

(52) U.S. Cl. CPC C12N 15/113; A61K 31/712; A61K 31/7125; A61K 47/6807; A61K 47/6849; A61P 21/00; C07K 16/2881

(57) ABSTRACT

Aspects of the disclosure relate to oligonucleotides (e.g., RNAi oligonucleotides such as siRNAs) designed to target DUX4 RNAs and targeting complexes for delivering the oligonucleotides to cells (e.g., muscle cells) and uses thereof, particularly uses relating to treatment of disease (e.g., FSHD).

### RELATED APPLICATIONS

[0001] This application claims the benefit under 35 U.S.C. § 119(e) to U.S. Provisional Application No. 63/133,156, entitled “MUSCLE-TARGETING COMPLEXES AND USES THEREOF FOR TREATING FACIOSCAPULOHUMERAL MUSCULAR DYSTROPHY”, filed on Dec. 31, 2020 and to U.S. Provisional Application No. 63/181,439, entitled “MUSCLE-TARGETING COMPLEXES AND USES THEREOF FOR TREATING FACIOSCAPULOHUMERAL MUSCULAR DYSTROPHY”, filed on Apr. 29, 2021; the contents of each of which are incorporated herein by reference in their entirety.

### FIELD OF THE INVENTION

[0002] The present application relates to oligonucleotides designed to target DUX4 RNAs and targeting complexes for delivering molecular payloads (e.g., oligonucleotides) to cells and uses thereof, particularly uses relating to treatment of disease.

### REFERENCE TO SEQUENCE LISTING SUBMITTED AS A TEXT FILE VIA EFS-WEB

[0003] The instant application contains a sequence listing which has been submitted in ASCII format via EFS-Web and is hereby incorporated by reference in its entirety. Said ASCII copy, created on Dec. 30, 2021, is named D082470047W000-SEQ-ZJG and is 708,513 bytes in size.

### BACKGROUND

[0004] Muscular dystrophies (MDs) are a group of diseases characterized by the progressive weakness and loss of muscle mass. These diseases are caused by mutations in genes which encode proteins needed to form healthy muscle tissue. Facioscapulohumeral muscular dystrophy (FSHD) is a dominantly inherited type of MD which primarily affects muscles of the face, shoulder blades, and upper arms. Other symptoms of FSHD include abdominal muscle weakness, retinal abnormalities, hearing loss, and joint pain and inflammation. FSHD is the most prevalent of the nine types of MD affecting both adults and children, with a worldwide incidence of about 1 in 8,300 people. FSHD is caused by aberrant production of double homeobox 4 (DUX4), a protein whose function is unknown. The DUX4 gene, which encodes the DUX4 protein, is located in the D4Z4 repeat region on chromosome 4 and is typically expressed only in fetal development, after which it is repressed by hypermethylation of the D4Z4 repeats which surround and compact the DUX4 gene. Two types of FSHD, Type 1 and Type 2 have been described. Type 1, which accounts for about 95% of cases, is associated with deletions of D4Z4 repeats on chromosome 4. Unaffected individuals generally have more than 10 repeats arrayed in the subtelomeric region of chromosome 4, whereas the most common form of FSHD (FSHD1) is caused by a contraction of the array to fewer than 10 repeats, associated with decreased epigenetic repression and variegated expression of DUX4 in skeletal muscle. Two allelic variants of chromosome 4q (4qA and 4qB) exist in the region distal to D4Z4. 4qA is in cis with a functional polyadenylation consensus site. Contractions on 4qA alleles are pathogenic because the DUX4 transcript is polyadenylated and translated into stable protein. Type 2 FSHD, which accounts for about 5% of cases, is associated with mutations of the SMCHD1 gene on chromosome 18. Besides supportive care and treatments to address the symptoms of the disease, there are no effective therapies for FSHD.

### SUMMARY

[0005] In some aspects, the disclosure provides oligonucleotides designed to target DUX4 RNAs. In some embodiments, the disclosure provides oligonucleotides complementary with DUX4 RNA that are useful for reducing levels of DUX4 mRNA and/or protein associated with features of facioscapulohumeral muscular dystrophy (FSHD) pathology, including muscle atrophy, inflammation, and decreased differentiation potential and oxidative stress. In some embodiments, the oligonucleotides provided herein are designed to direct RNAi mediated degradation of DUX4 RNA. In some embodiments, the oligonucleotides are designed to efficiently engage the RNA-induced silencing complex (RISC) for degradation of the DUX4 RNA but also have reduced off-target effect. In some embodiments, the oligonucleotides are designed to reduce levels of DUX4 RNA and/or protein. In some embodiments, the oligonucleotides are designed to have desirable bioavailability and/or serum-stability properties. In some embodiments, the oligonucleotides are designed to have desirable binding affinity properties. In some embodiments, the oligonucleotides are designed to have desirable toxicity and/or immunogenicity profiles.

[0006] According to some aspects, the disclosure provides complexes that target muscle cells (e.g., primary myoblasts) for purposes of delivering molecular payloads (e.g., the DUX4-targeting oligonucleotides described herein) to those cells. In some embodiments, complexes provided herein are particularly useful for delivering molecular payloads that inhibit the expression or activity of DUX4, e.g., in a subject having or suspected of having Facioscapulohumeral muscular dystrophy (FSHD). Accordingly, in some embodiments, complexes provided herein comprise muscle-targeting agents (e.g., muscle targeting antibodies) that specifically bind to receptors on the surface of muscle cells for purposes of delivering molecular payloads to the muscle cells. In some embodiments, the complexes are taken up into the cells via a receptor mediated internalization, following which the molecular payload may be released to perform a function inside the cells. For example, complexes engineered to deliver oligonucleotides may release the oligonucleotides such that the oligonucleotides can inhibit DUX4 gene expression in the muscle cells. In some embodiments, the oligonucleotides are released by endosomal cleavage of covalent linkers connecting oligonucleotides and muscle-targeting agents of the complexes.

[0007] Some aspects of the present disclosure provide complexes comprising a muscle-targeting agent covalently linked to an oligonucleotide targeting a double homeobox 4 (DUX4) mRNA, wherein the oligonucleotide comprises an antisense strand of 18-25 nucleotides in length and comprises a region of complementarity to a target sequence as set forth in SEQ ID NOs: 356, 501, 1398, 494, 509, 224, 1320, 561, 225, 226, 261, 265, 320, 341, 343, 388, 466, 483, 552, 560, 601, 921, 942, 953, 1294, 1296, 1301, 1321, 1322, 1323, 1324, 1325, 1373, 1394, 1395, 1523, 1531, 1548, 1558, and 1561, and wherein the region of complementarity is at least 16 consecutive nucleosides in length.

[0008] In some embodiments, the muscle-targeting agent is an anti-transferrin receptor (TfR) antibody.

[0009] In some embodiments, the oligonucleotide is an RNAi oligonucleotide.

[0010] In some embodiments, the antisense strand comprises the nucleotide sequence of any one of SEQ ID NOs: 3035, 3040, 3061, 3039, 3041, 3027, 3052, 3044, 3028, 3029, 3030, 3031, 3032, 3033, 3034, 3036, 3037, 3038, 3042, 3043, 3045, 3046, 3047, 3048, 3049, 3050, 3051, 3053, 3054, 3055, 3056, 3057, 3058, 3059, 3060, 3062, 3063, 3064, 3065, and 3066.

[0011] In some embodiments, the oligonucleotide further comprises a sense strand which comprises at least 18 consecutive nucleosides complementary to the antisense strand.

[0012] In some embodiments, the oligonucleotide comprises one or more modified nucleosides.

[0013] In some embodiments, the one or more modified nucleosides are 2′ modified nucleotides, optionally wherein the one or more 2′ modified nucleosides are selected from: 2′-fluoro (2′-F), 2′-O-methyl (2′-O-Me), 2′-O-methoxyethyl (2′-MOE), 2′-O-aminopropyl (2′-O-AP), 2′-O-dimethylaminoethyl (2′-O-DMAOE), 2′-O-dimethylaminopropyl (2′-O-DMAP), 2′-O-dimethylaminoethyloxyethyl (2′-O-DMAEOE), 2′-O—N-methylacetamido (2′-O-NMA)).

[0014] In some embodiments, each 2′ modified nucleotide is 2′-O-methyl or 2′-fluoro (2′-F).

[0015] In some embodiments, the oligonucleotide comprises one or more phosphorothioate internucleoside linkages.

[0016] In some embodiments, the one or more phosphorothioate internucleoside linkage are present on the antisense strand of the oligonucleotide.

[0017] In some embodiments, the two internucleoside linkages at the 3′ end of the antisense strands are phosphorothioate internucleoside linkages.

[0018] In some embodiments, one or more cytidines of the oligonucleotide is a 2′-modified 5-methyl-cytidine, optionally wherein the 2′-modified 5-methyl-cytidine is a 2′-O-Me modified 5-methyl-cytidine or a 2′-F modified 5-methyl-cytidine.

[0019] In some embodiments, the antisense strand is selected from the modified version of SEQ ID NOs: 3035, 3040, 3061, 3039, 3041, 3027, 3052, 3044, 3028, 3029, 3030, 3031, 3032, 3033, 3034, 3036, 3037, 3038, 3042, 3043, 3045, 3046, 3047, 3048, 3049, 3050, 3051, 3053, 3054, 3055, 3056, 3057, 3058, 3059, 3060, 3062, 3063, 3064, 3065, and 3066 listed in Table 8.

[0020] In some embodiments, the sense strand is selected from the modified version of SEQ ID NOs: 2995, 3000, 3021, 2999, 3001, 2987, 3012, 3004, 2988, 2989, 2990, 2991, 2992, 2993, 2994, 2996, 2997, 2998, 3002, 3003, 3005, 3006, 3007, 3008, 3009, 3010, 3011, 3013, 3014, 3015, 3016, 3017, 3018, 3019, 3020, 3022, 3023, 3024, 3025, and 3026 listed in Table 8.

[0021] In some embodiments, the oligonucleotide is a siRNA molecule selected from the siRNAs listed in Table 8.

[0022] In some embodiments, the antisense strand is selected from the modified version of SEQ ID NOs: 3040, 3061, 3027, 3037, 3039, 3041, 3044, and 3052 listed in Table 9.

[0023] In some embodiments, the sense strand is selected from the modified version of SEQ ID NOs: 3000, 3021, 2987, 2997, 2999, 3001, 3004, and 3012 listed in Table 9.

[0024] In some embodiments, the RNAi oligonucleotide is a siRNA molecule selected from the siRNAs listed in Table 9.

[0025] In some embodiments, the anti-TfR antibody comprises a heavy chain complementarity determining region 1 (CDR-H1), a heavy chain complementarity determining region 2 (CDR-H2), a heavy chain complementarity determining region 3 (CDR-H3), a light chain complementarity determining region 1 (CDR-L1), a light chain complementarity determining region 2 (CDR-L2), a light chain complementarity determining region 3 (CDR-L3) of any of the anti-TfR antibodies listed in Table 2.

[0026] In some embodiments, the anti-TfR antibody comprises a heavy chain variable region (VH) and a light chain variable region (VL) of any of the anti-TfR antibodies listed in Table 3.

[0027] In some embodiments, the anti-TfR antibody is a Fab, optionally wherein the Fab comprises a heavy chain and a light chain of any of the anti-TfR Fabs listed in Table 5.

[0028] In some embodiments, the anti-TfR antibody comprises:
[0029] (i) a CDR-H1 comprising the amino acid sequence of SEQ ID NO: 27, a CDR-H2 comprising the amino acid sequence of SEQ ID NO: 28, a CDR-H3 comprising the amino acid sequence of SEQ ID NO: 29, a CDR-L1 comprising the amino acid sequence of SEQ ID NO: 30, a CDR-L2 comprising the amino acid sequence of SEQ ID NO: 31, and a CDR-L3 comprising the amino acid sequence of SEQ ID NO: 32;
[0030] (ii) a CDR-H1 comprising the amino acid sequence of SEQ ID NO: 33, a CDR-H2 comprising the amino acid sequence of SEQ ID NO: 34, a CDR-H3 comprising the amino acid sequence of SEQ ID NO: 35, a CDR-L1 comprising the amino acid sequence of SEQ ID NO: 36, a CDR-L2 comprising the amino acid sequence of SEQ ID NO: 37, and a CDR-L3 comprising the amino acid sequence of SEQ ID NO: 32; or
[0031] (ii) a CDR-H1 comprising the amino acid sequence of SEQ ID NO: 38, a CDR-H2 comprising the amino acid sequence of SEQ ID NO: 39, a CDR-H3 comprising the amino acid sequence of SEQ ID NO: 40, a CDR-L1 comprising the amino acid sequence of SEQ ID NO: 41, a CDR-L2 comprising the amino acid sequence of SEQ ID NO: 31, and a CDR-L3 comprising the amino acid sequence of SEQ ID NO: 42.

[0032] In some embodiments, the anti-TfR antibody comprises a VH comprising the amino acid sequence of SEQ ID NO: 76, and a VL comprising the amino acid sequence of SEQ ID NO: 75.

[0033] In some embodiments, the anti-TfR antibody is a Fab and comprises a heavy chain comprising the amino acid sequence of SEQ ID NO: 101 and a light chain comprising the amino acid sequence of SEQ ID NO: 90.

[0034] In some embodiments, the muscle targeting agent and the antisense oligonucleotide are covalently linked via a linker, optionally wherein the linker comprises a valine-citrulline sequence.

[0035] Further provided herein are methods of reducing DUX4 expression in a muscle cell, the method comprising contacting the muscle cell with an effective amount of the complex described herein for promoting internalization of the oligonucleotide to the muscle cell.

[0036] Further provided herein are methods of treating facioscapulohumeral muscular dystrophy (FSHD), the method comprising administering to a subject in need thereof an effective amount of the complex of any one of claims 1-18, wherein the subject has aberrant production of DUX4 protein.

[0037] Other aspects of the present disclosure provide oligonucleotides comprising an siRNA oligonucleotide selected from:

Antisense strand:
(SEQ ID NO: 3035)
5'-fCfUmCfUmCfAmUfUmCfUmGfAmAfAmCfCmAfAmAfUmC*fU*mG-3′
Sense strand:
(SEQ ID NO: 2995)
5′-mGmAfUmUfUmGfGmUfUmUfCmAfGmAfAmUfGmAfGmAfG-3′;
Antisense strand:
(SEQ ID NO: 3040)
5′-fUfGmGfAmAfAmGfCmGfAmUfCmCfUmUfCmUfCmAfAmA*fG*mG-3′
Sense strand:
(SEQ ID NO: 3000)
5′-mUmUfUmGfAmGfAmAfGmGfAmUfCmGfCmUfUmUfCmCfA-3′;
Antisense strand:
(SEQ ID NO: 3061)
5′-fCfCmGfGmUfAmUfUmCfUmUfCmCfUmCfGmCfUmGfAmG*fG*mG-3′
Sense strand:
(SEQ ID NO: 3021)
5′-mCmUfCmAfGmCfGmAfGmGfAmAfGmAfAmUfAmCfCmGfG-3′;
Antisense strand:
(SEQ ID NO: 3039)
5′-fCfGmAfUmCfCmUfUmCfUmCfAmAfAmGfGmCfUmCfGmG*fA*mG-3′
Sense strand:
(SEQ ID NO: 2999)
5′-mCmCfGmAfGmCfCmUfUmUfGmAfGmAfAmGfGmAfUmCfG-3′;
Antisense strand:
(SEQ ID NO: 3041)
5′-fGfCmGfAmUfGmCfCmUfGmGfAmAfAmGfCmGfAmUfCmC*fU*mU-3′
Sense strand:
(SEQ ID NO: 3001)
5′-mGmGfAmUfCmGfCmUfUmUfCmCfAmGfGmCfAmUfCmGfC-3′;
Antisense strand:
(SEQ ID NO: 3027)
5′-fGfUmCfCmAfAmAfCmGfAmGfUmCfUmCfCmGfUmCfGmC*fC*mG-3′
Sense strand:
(SEQ ID NO: 2987)
5′-mGmCfGmAfCmGfGmAfGmAfCmUfCmGfUmUfUmGfGmAfC-3′;
Antisense strand:
(SEQ ID NO: 3052)
5′-fUfUmCfUmAfGmGfAmGfAmGfGmUfUmGfCmGfCmCfUmG*fC*mU-3′
Sense strand:
(SEQ ID NO: 3012)
5′-mCmAfGmGfCmGfCmAfAmCfCmUfCmUfCmCfUmAfGmAfA-3′;
Antisense strand:
(SEQ ID NO: 3044)
5′-fCfUmGfAmAfUmCfCmUfGmGfAmCfUmCfCmGfGmGfAmG*fG*mC-3′
Sense strand:
(SEQ ID NO: 3004)
5′-mCmUfCmCfCmGfGmAfGmUfCmCfAmGfGmAfUmUfCmAfG-3′;
Antisense strand:
(SEQ ID NO: 3031)
5′-fUfCmCfGmCfUmCfAmAfAmGfCmAfGmGfCmUfCmGfCmA*fG*mG-3′
Sense strand:
(SEQ ID NO: 2991)
5′-mUmGfCmGfAmGfCmCfUmGfCmUfUmUfGmAfGmCfGmGfA-3′;
Antisense strand:
(SEQ ID NO: 3034)
5′-fAfCmCfAmAfAmUfCmUfGmGfAmCfCmCfUmGfGmGfCmU*fC*mC-3′
Sense strand:
(SEQ ID NO: 2994)
5′-mAmGfCmCfCmAfGmGfGmUfCmCfAmGfAmUfUmUfGmGfU-3′;
Antisense strand:
(SEQ ID NO: 3032)
5′-fGfGmAfAmUfGmCfCmGfAmUfGmGfCmCfUmGfGmGfCmC*fA*mG-3′
Sense strand:
(SEQ ID NO: 2992)
5′-mGmGfCmCfCmAfGmGfCmCfAmUfCmGfGmCfAmUfUmCfC-3′;
Antisense strand:
(SEQ ID NO: 3033)
5′-fCfAmAfAmUfCmUfGmGfAmCfCmCfUmGfGmGfCmUfCmC*fG*mG-3′
Sense strand:
(SEQ ID NO: 2993)
5′-mGmGfAmGfCmCfCmAfGmGfGmUfCmCfAmGfAmUfUmUfG-3′;
Antisense strand:
(SEQ ID NO: 3042)
5′-fGfGmAfCmUfCmCfGmGfGmAfGmGfCmCfCmGfUmCfUmC*fU*mC-3′
Sense strand:
(SEQ ID NO: 3002)
5′-mGmAfGmAfCmGfGmGfCmCfUmCfCmCfGmGfAmGfUmCfC-3′;
Antisense strand:
(SEQ ID NO: 3030)
5′-fCfUmCfAmAfAmGfCmAfGmGfCmUfCmGfCmAfGmGfGmC*fC*mU-3′
Sense strand:
(SEQ ID NO: 2990)
5′-mGmCfCmCfUmGfCmGfAmGfCmCfUmGfCmUfUmUfGmAfG-3′;
Antisense strand:
(SEQ ID NO: 3036)
5′-fAfUmUfCmCfCmGfCmCfGmGfUmGfCmUfGmCfCmUfCmA*fG*mC-3′
Sense strand:
(SEQ ID NO: 2996)
5′-mUmGfAmGfGmCfAmGfCmAfCmCfGmGfCmGfGmGfAmAfU-3′;
Antisense strand:
(SEQ ID NO: 3065)
5′-fAfUmGfCmCfCmAfGmGfAmAfAmGfAmAfUmGfGmCfAmG*fU*mU-3′
Sense strand:
(SEQ ID NO: 3025)
5′-mCmUfGmCfCmAfUmUfCmUfUmUfCmCfUmGfGmGfCmAfU-3′;
Antisense strand:
(SEQ ID NO: 3054)
5′-fGfUmUfUmCfUmAfGmGfAmGfAmGfGmUfUmGfCmGfCmC*fU*mG-3′
Sense strand:
(SEQ ID NO: 3014)
5′-mGmGfCmGfCmAfAmCfCmUfCmUfCmCfUmAfGmAfAmAfC-3′;
Antisense strand:
(SEQ ID NO: 3057)
5′-fUfCmCfGmUfUmUfCmUfAmGfGmAfGmAfGmGfUmUfGmC*fG*mC-3′
Sense strand:
(SEQ ID NO: 3017)
5′-mGmCfAmAfCmCfUmCfUmCfCmUfAmGfAmAfAmCfGmGfA-3′;
Antisense strand:
(SEQ ID NO: 3049)
5′-fGfAmAfAmCfUmCfCmGfGmGfCmUfCmGfCmCfAmGfGmA*fG*mC-3′
Sense strand:
(SEQ ID NO: 3009)
5′-mUmCfCmUfGmGfCmGfAmGfCmCfCmGfGmAfGmUfUmUfC-3′;
Antisense strand:
(SEQ ID NO: 3064)
5′-fAfAmGfAmAfUmGfGmCfAmGfUmUfCmUfCmCfGmCfGmG*fU*mG-3′
Sense strand:
(SEQ ID NO: 3024)
5′-mCmCfGmCfGmGfAmGfAmAfCmUfGmCfCmAfUmUfCmUfU-3′;
Antisense strand:
(SEQ ID NO: 3055)
5′-fCfGmUfUmUfCmUfAmGfGmAfGmAfGmGfUmUfGmCfGmC*fC*mU-3′
Sense strand:
(SEQ ID NO: 3015)
5′-mGmCfGmCfAmAfCmCfUmCfUmCfCmUfAmGfAmAfAmCfG-3′;
Antisense strand:
(SEQ ID NO: 3028)
5′-fGfGmUfCmCfAmAfAmCfGmAfGmUfCmUfCmCfGmUfCmG*fC*mC-3′
Sense strand:
(SEQ ID NO: 2988)
5′-mCmGfAmCfGmGfAmGfAmCfUmCfGmUfUmUfGmGfAmCfC-3′;
Antisense strand:
(SEQ ID NO: 3063)
5′-fGfCmGfGmUfGmUfGmGfAmGfUmCfUmCfUmCfAmCfCmG*fG*mG-3′
Sense strand:
(SEQ ID NO: 3023)
5′-mCmGfGmUfGmAfGmAfGmAfCmUfCmCfAmCfAmCfCmGfC-3′;
Antisense strand:
(SEQ ID NO: 3059)
5′-fUfAmUfUmCfUmUfCmCfUmCfGmCfUmGfAmGfGmGfGmU*fG*mC-3′
Sense strand:
(SEQ ID NO: 3019)
5′-mAmCfCmCfCmUfCmAfGmCfGmAfGmGfAmAfGmAfAmUfA-3′;
Antisense strand:
(SEQ ID NO: 3029)
5′-fGfGmGfUmCfCmAfAmAfCmGfAmGfUmCfUmCfCmGfUmC*fG*mC-3′
Sense strand:
(SEQ ID NO: 2989)
5′-mGmAfCmGfGmAfGmAfCmUfCmGfUmUfUmGfGmAfCmCfC-3′;
Antisense strand:
(SEQ ID NO: 3053)
5′-fUfUmUfCmUfAmGfGmAfGmAfGmGfUmUfGmCfGmCfCmU*fG*mC-3′
Sense strand:
(SEQ ID NO: 3013)
5′-mAmGfGmCfGmCfAmAfCmCfUmCfUmCfCmUfAmGfAmAfA-3′;
Antisense strand:
(SEQ ID NO: 3050)
5′-fCfAmGfAmAfAmCfUmCfCmGfGmGfCmUfCmGfCmCfAmG*fG*mA-3′
Sense strand:
(SEQ ID NO: 3010)
5′-mCmUfGmGfCmGfAmGfCmCfCmGfGmAfGmUfUmUfCmUfG-3′;
Antisense strand:
(SEQ ID NO: 3038)
5′-fAfAmAfGmGfCmUfCmGfGmAfGmGfAmGfCmAfGmGfGmC*fG*mG-3′
Sense strand:
(SEQ ID NO: 2998)
5′-mGmCfCmCfUmGfCmUfCmCfUmCfCmGfAmGfCmCfUmUfU-3′;
Antisense strand:
(SEQ ID NO: 3047)
5′-fGfCmUfUmUfUmGfCmCfCmGfGmGfUmGfCmGfGmAfGmG*fC*mC-3′
Sense strand:
(SEQ ID NO: 3007)
5′-mCmCfUmCfCmGfCmAfCmCfCmGfGmGfCmAfAmAfAmGfC-3′;
Antisense strand:
(SEQ ID NO: 3045)
5′-fCfCmUfGmUfCmCfCmGfGmGfUmGfCmCfUmGfGmCfCmC*fU*mU-3′
Sense strand:
(SEQ ID NO: 3005)
5′-mGmGfGmCfCmAfGmGfCmAfCmCfCmGfGmGfAmCfAmGfG-3′;
Antisense strand:
(SEQ ID NO: 3043)
5′-fUfGmAfAmUfCmCfUmGfGmAfCmUfCmCfGmGfGmAfGmG*fC*mC-3′
T T Sense strand:
(SEQ ID NO: 3003)
5′-mCmCfUmCfCmCfGmGfAmGfUmCfCmAfGmGfAmUfUmCfA-3′;
Antisense strand:
(SEQ ID NO: 3066)
5′-fGfGmGfAmUfGmCfCmCfAmGfGmAfAmAfGmAfAmUfGmG*fC*mA-3′
Sense strand:
(SEQ ID NO: 3026)
5′-mCmCfAmUfUmCfUmUfUmCfCmUfGmGfGmCfAmUfCmCfC-3′;
Antisense strand:
(SEQ ID NO: 3062)
5′-fGfAmGfUmCfUmCfUmCfAmCfCmGfGmGfCmCfUmAfGmA*fC*mC-3′
Sense strand:
(SEQ ID NO: 3022)
5′-mUmCfUmAfGmGfCmCfCmGfGmUfGmAfGmAfGmAfCmUfC-3′;
Antisense strand:
(SEQ ID NO: 3056)
5′-fCfCmGfUmUfUmCfUmAfGmGfAmGfAmGfGmUfUmGfCmG*fC*mC-3′
Sense strand:
(SEQ ID NO: 3016)
5′-mCmGfCmAfAmCfCmUfCmUfCmCfUmAfGmAfAmAfCmGfG-3′;
Antisense strand:
(SEQ ID NO: 3048)
5′-fCfGmGfUmCfCmUfCmCfCmGfGmCfUmUfUmUfGmCfCmC*fG*mG-3′
Sense strand:
(SEQ ID NO: 3008)
5′-mGmGfGmCfAmAfAmAfGmCfCmGfGmGfAmGfGmAfCmCfG-3′;
Antisense strand:
(SEQ ID NO: 3046)
5′-fCfCmAfGmCfGmAfGmGfAmGfCmCfUmGfAmGfGmGfUmG*fG*mG-3′
Sense strand:
(SEQ ID NO: 3006)
5′-mCmAfCmCfCmUfCmAfGmGfCmUfCmCfUmCfGmCfUmGfG-3′;
Antisense strand:
(SEQ ID NO: 3058)
5′-fGfCmUfUmCfCmAfGmCfGmAfGmGfCmGfGmCfCmUfCmU*fU*mC-3′
Sense strand:
(SEQ ID NO: 3018)
5′-mAmGfAmGfGmCfCmGfCmCfUmCfGmCfUmGfGmAfAmGfC-3′;
Antisense strand:
(SEQ ID NO: 3037)
5′-fGfGmGfCmGfGmUfCmUfGmGfGmAfUmCfCmGfGmUfGmA*fC*mG-3′
Sense strand:
(SEQ ID NO: 2997)
5′-mUmCfAmCfCmGfGmAfUmCfCmCfAmGfAmCfCmGfCmCfC-3′;
Antisense strand:
(SEQ ID NO: 3060)
5′-fGfUmAfUmUfCmUfUmCfCmUfCmGfCmUfGmAfGmGfGmG*fU*mG-3′
Sense strand:
(SEQ ID NO: 3020)
5′-mCmCfCmCfUmCfAmGfCmGfAmGfGmAfAmGfAmAfUmAfC-3′
and
Antisense strand:
(SEQ ID NO: 3051)
5′-fUfGmCfUmGfCmAfGmAfAmAfCmUfCmCfGmGfGmCfUmC*fG*mC-3′
Sense strand:
(SEQ ID NO: 3011)
5′-mGmAfGmCfCmCfGmGfAmGfUmUfUmCfUmGfCmAfGmCfA-3′
wherein “m” indicates a 2'-O-methyl (2'-O-Me) modified nucleoside;
“f” indicates a 2'-fluoro (2'-F) modified nucleoside;
“*” indicates phosphorothioate internucleoside linkage;
and the absence of “*” between two nucleosides
indicate phosphodiester internucleoside linkage.

[0038] Other aspects of the present disclosure provide oligonucleotides comprising an siRNA oligonucleotide selected from:

Antisense strand:
(SEQ ID NO: 3040)
5′-fUfGmGfAmAfAmGfxCmGfAmUfCmCfUmUfCmUfCmAfAmA*fG*mG-3′
Sense strand:
(SEQ ID NO: 3000)
5′-mUmUfUmGfAmGfAmAfGmGfAmUfxCmGfCmUfUmUfCmCfA-3′;
Antisense strand:
(SEQ ID NO: 3061)
5′-fCfxCmGfGmUfAmUfUmCfUmUfCmCfUmxCfGmCfUmGfAmG*fG*mG-3′
Sense strand:
(SEQ ID NO: 3021)
5′-mCmUfCmAfGmxCfGmAfGmGfAmAfGmAfAmUfAmCfxCmGfG-3′;
Antisense strand:
(SEQ ID NO: 3027)
5′-fGfUmCfCmAfAmAfxCmGfAmGfUmCfUmCfxCmGfUmxCfGmC*fxC*mG-3′
Sense strand:
(SEQ ID NO: 2987)
5′-mGmxCfGmAfxCmGfGmAfGmAfCmUfxCmGfUmUfUmGfGmAfC-3′;
Antisense strand:
(SEQ ID NO: 3037)
5′-fGfGmGfxCmGfGmUfCmUfGmGfGmAfUmCfxCmGfGmUfGmA*fxC*mG-3′
Sense strand:
(SEQ ID NO: 2997)
5′-mUmCfAmCfxCmGfGmAfUmCfCmCfAmGfAmCfxCmGfCmCfC-3′;
Antisense strand:
(SEQ ID NO: 3039)
5′-fxCfGmAfUmCfCmUfUmCfUmCfAmAfAmGfGmCfUmxCfGmG*fA*mG-3′
Sense strand:
(SEQ ID NO: 2999)
5′-mCmxCfGmAfGmCfCmUfUmUfGmAfGmAfAmGfGmAfUmxCfG-3′;
Antisense strand:
(SEQ ID NO: 3041)
5′-fGfxCmGfAmUfGmCfCmUfGmGfAmAfAmGfxCmGfAmUfCmC*fU*mU-3′
Sense strand:
(SEQ ID NO: 3001)
5′-mGmGfAmUfxCmGfCmUfUmUfCmCfAmGfGmCfAmUfxCmGfC-3′;
Antisense strand:
(SEQ ID NO: 3044)
5′-fCfUmGfAmAfUmCfCmUfGmGfAmCfUmCfxCmGfGmGfAmG*fG*mC-3′
Sense strand:
(SEQ ID NO: 3004)
5′-mCmUfCmCfxCmGfGmAfGmUfCmCfAmGfGmAfUmUfCmAfG-3′; and
and
Antisense strand:
(SEQ ID NO: 3052)
5′-fUfUmCfUmAfGmGfAmGfAmGfGmUfUmGfxCmGfCmCfUmG*fC*mU-3′
Sense strand:
(SEQ ID NO: 3012)
5′-mCmAfGmGfxCmGfCmAfAmCfCmUfCmUfCmCfUmAfGmAfA-3′
wherein “m” indicates a 2'-O-methyl (2'-O-Me) modified nucleoside;
“f” indicates a 2'-fluoro (2'-F) modified nucleoside;
“mxC” indicates 2'-O-Me modified 5-methyl-cytidine;
“fxC” indicates 2'-F modified 5-methyl-cytidine;
“*” indicates phosphorothioate internucleoside linkage;
and the absence of “*” between two nucleosides indicates
phosphodiester internucleoside linkage.

[0039] Other aspects of the present disclosure provide complexes comprising a muscle-targeting agent covalently linked to an oligonucleotide targeting a double homeobox 4 (DUX4) mRNA, wherein the oligonucleotide comprises an antisense strand of 18-25 nucleotides in length and comprises a region of complementarity to a target sequence as set forth in SEQ ID NOs: 163-1574, and wherein the region of complementarity is at least 16 consecutive nucleosides in length. In some embodiments, the muscle-targeting agent is an anti-transferrin receptor (TfR) antibody. In some embodiments, the oligonucleotide is an RNAi oligonucleotide. In some embodiments, the antisense strand comprises the nucleotide sequence of any one of SEQ ID NOs: 1575-2986.

### BRIEF DESCRIPTION OF THE DRAWINGS

[0040] FIG. 1 depicts a non-limiting schematic showing the effect of transfecting cells with an siRNA.

[0041] FIG. 2 depicts a non-limiting schematic showing the activity of a muscle targeting complex comprising an siRNA.

[0042] FIGS. 3A-3B depict non-limiting schematics showing the activity of a muscle targeting complex comprising an siRNA in mouse muscle tissues (gastrocnemius and heart) in vivo, relative to vehicle-treated controls. (N=4 C57BL/6 WT mice)

[0043] FIGS. 4A-4E depict non-limiting schematics showing the tissue selectivity of a muscle targeting complex comprising an siRNA.

[0044] FIGS. 5A-5B show the activities of DUX4-targeting siRNAs listed in Table 8 in knocking down DUX4 mRNA expression in Hepa1-6 cells. FIG. 5A shows the activities of the siRNAs in knocking down DUX4 mRNA when the Hepa1-6 cells were treated with 2 nM or 10 nM of each indicated siRNA. FIG. 5B shows a dose response curve for siRNA 9, which yields an IC50 value of 176 pM.

[0045] FIGS. 6A-6H are dose response curves showing reduction of MBD3L2 mRNA following transfection of AB1080 immortalized FSHD patient-derived myotubes with certain DUX4-targeting siRNAs listed in Table 8 at various concentrations. The siRNAs tested are siRNA9 (FIG. 6A); siRNA14 (FIG. 6B); siRNA35 (FIG. 6C), siRNA13 (FIG. 6D), siRNA15 (FIG. 6E), siRNA1 (FIG. 6F), siRNA26 (FIG. 6G), and siRNA18 (FIG. 6H).

[0046] FIG. 7 shows a composite of the mRNA levels of three DUX4 transcriptome markers (MBD3L2, TRIM43, and ZSCAN4) in AB1080 immortalized FSHD patient-derived myotubes, following incubation with siRNA conjugates containing an anti-TfR Fab 3M12 VH4/Vκ3 covalently linked siRNA9, siRNA14, or siRNA35 (corresponding to siRNA9, siRNA14, siRNA35 in Table 8). The anti-TfR Fab was covalently linked to the 3′ end of the sense strand of each siRNA via a linker, and the corresponding antisense strand was annealed to the sense strand.

### DETAILED DESCRIPTION

[0047] Some aspects of the present disclosure provide oligonucleotides designed to target DUX4 RNAs. In some embodiments, the disclosure provides oligonucleotides complementary with DUX4 RNA that are useful for reducing levels of DUX4 mRNA and/or protein associated with features of facioscapulohumeral muscular dystrophy (FSHD) pathology, including muscle atrophy, in inflammation, and decreased differentiation potential and oxidative stress. In some embodiments, the oligonucleotides provided herein are designed to direct RNAi mediated degradation of DUX4 RNA. In some embodiments, the oligonucleotides are designed to efficiently engage the RNA-induced silencing complex (RISC) for degradation of the DUX4 RNA but also have reduced off-target effect. In some embodiments, the oligonucleotides are designed to reduce levels of DUX4 RNA and/or protein. In some embodiments, the oligonucleotides are designed to have desirable bioavailability and/or serum-stability properties. In some embodiments, the oligonucleotides are designed to have desirable binding affinity properties. In some embodiments, the oligonucleotides are designed to have desirable toxicity and/or immunogenicity profiles.

[0048] In some aspects, the present disclosure provides complexes comprising muscle-targeting agents covalently linked to DUX4-targeting oligonucleotides for effective delivery of the oligonucleotides to muscle cells. In some embodiments, the complexes are particularly useful for delivering molecular payloads that inhibit the expression or activity of target genes in muscle cells, e.g., in a subject having or suspected of having a rare muscle disease. For example, in some embodiments, complexes are provided for targeting a DUX4 to treat subjects having FSHD. In some embodiments, complexes provided herein comprise oligonucleotides that inhibit expression of DUX4 in a subject that has one or more D4Z4 repeat deletions on chromosome 4.

[0049] Further aspects of the disclosure, including a description of defined terms, are provided below.

### I. Definitions

[0050] Administering: As used herein, the terms “administering” or “administration” means to provide a complex to a subject in a manner that is physiologically and/or (e.g., and) pharmacologically useful (e.g., to treat a condition in the subject).

[0051] Approximately: As used herein, the term “approximately” or “about,” as applied to one or more values of interest, refers to a value that is similar to a stated reference value. In certain embodiments, the term “approximately” or “about” refers to a range of values that fall within 15%1, 4%1, 3%, 12%, 11%, 10%, 9%, 8%, 7%, 6%, 5%, 4%, 3%, 2%, 1%, or less in either direction (greater than or less than) of the stated reference value unless otherwise stated or otherwise evident from the context (except where such number would exceed 100% of a possible value).

[0052] Antibody: As used herein, the term “antibody” refers to a polypeptide that includes at least one immunoglobulin variable domain or at least one antigenic determinant, e.g., paratope that specifically binds to an antigen. In some embodiments, an antibody is a full-length antibody. In some embodiments, an antibody is a chimeric antibody. In some embodiments, an antibody is a humanized antibody. However, in some embodiments, an antibody is a Fab fragment, a Fab′ fragment, a F(ab′)2 fragment, a Fv fragment or a scFv fragment. In some embodiments, an antibody is a nanobody derived from a camelid antibody or a nanobody derived from shark antibody. In some embodiments, an antibody is a diabody. In some embodiments, an antibody comprises a framework having a human germline sequence. In another embodiment, an antibody comprises a heavy chain constant domain selected from the group consisting of IgG, IgG1, IgG2, IgG2A, IgG2B, IgG2C, IgG3, IgG4, IgA1, IgA2, IgD, IgM, and IgE constant domains. In some embodiments, an antibody comprises a heavy (H) chain variable region (abbreviated herein as VH), and/or (e.g., and) a light (L) chain variable region (abbreviated herein as VL). In some embodiments, an antibody comprises a constant domain, e.g., an Fc region. An immunoglobulin constant domain refers to a heavy or light chain constant domain. Human IgG heavy chain and light chain constant domain amino acid sequences and their functional variations are known. With respect to the heavy chain, in some embodiments, the heavy chain of an antibody described herein can be an alpha (α), delta (Δ), epsilon (ε), gamma (γ) or mu (μ) heavy chain. In some embodiments, the heavy chain of an antibody described herein can comprise a human alpha (α), delta (Δ), epsilon (ε), gamma (γ) or mu (μ) heavy chain. In a particular embodiment, an antibody described herein comprises a human gamma 1 CH1, CH2, and/or (e.g., and) CH3 domain. In some embodiments, the amino acid sequence of the VH domain comprises the amino acid sequence of a human gamma (γ) heavy chain constant region, such as any known in the art. Non-limiting examples of human constant region sequences have been described in the art, e.g., see U.S. Pat. No. 5,693,780 and Kabat E A et al., (1991) supra. In some embodiments, the VH domain comprises an amino acid sequence that is at least 70%, 75%, 80%, 85%, 90%, 95%, 98%, or at least 99% identical to any of the variable chain constant regions provided herein. In some embodiments, an antibody is modified, e.g., modified via glycosylation, phosphorylation, sumoylation, and/or (e.g., and) methylation. In some embodiments, an antibody is a glycosylated antibody, which is conjugated to one or more sugar or carbohydrate molecules. In some embodiments, the one or more sugar or carbohydrate molecule are conjugated to the antibody via N-glycosylation, O-glycosylation, C-glycosylation, glypiation (GPI anchor attachment), and/or (e.g., and) phosphoglycosylation. In some embodiments, the one or more sugar or carbohydrate molecule are monosaccharides, disaccharides, oligosaccharides, or glycans. In some embodiments, the one or more sugar or carbohydrate molecule is a branched oligosaccharide or a branched glycan. In some embodiments, the one or more sugar or carbohydrate molecule includes a mannose unit, a glucose unit, an N-acetylglucosamine unit, an N-acetylgalactosamine unit, a galactose unit, a fucose unit, or a phospholipid unit. In some embodiments, an antibody is a construct that comprises a polypeptide comprising one or more antigen binding fragments of the disclosure linked to a linker polypeptide or an immunoglobulin constant domain. Linker polypeptides comprise two or more amino acid residues joined by peptide bonds and are used to link one or more antigen binding portions. Examples of linker polypeptides have been reported (see e.g., Holliger, P., et al. (1993) Proc. Natl. Acad. Sci. USA 90:6444-6448; Poljak, R. J., et al. (1994) Structure 2:1121-1123). Still further, an antibody may be part of a larger immunoadhesion molecule, formed by covalent or noncovalent association of the antibody or antibody portion with one or more other proteins or peptides. Examples of such immunoadhesion molecules include use of the streptavidin core region to make a tetrameric scFv molecule (Kipriyanov, S. M., et al. (1995) Human Antibodies and Hybridomas 6:93-101) and use of a cysteine residue, a marker peptide and a C-terminal polyhistidine tag to make bivalent and biotinylated scFv molecules (Kipriyanov, S. M., et al. (1994) Mol. Immunol. 31:1047-1058).

[0053] CDR: As used herein, the term “CDR” refers to the complementarity determining region within antibody variable sequences. A typical antibody molecule comprises a heavy chain variable region (VH) and a light chain variable region (VL), which are usually involved in antigen binding. The VH and VL regions can be further subdivided into regions of hypervariability, also known as “complementarity determining regions” (“CDR”), interspersed with regions that are more conserved, which are known as “framework regions” (“FR”). Each VH and VL is typically composed of three CDRs and four FRs, arranged from amino-terminus to carboxy-terminus in the following order: FR1, CDR1, FR2, CDR2, FR3, CDR3, FR4. The extent of the framework region and CDRs can be precisely identified using methodology known in the art, for example, by the Kabat definition, the IMGT definition, the Chothia definition, the AbM definition, and/or (e.g., and) the contact definition, all of which are well known in the art. See, e.g., Kabat, E. A., et al. (1991) Sequences of Proteins of Immunological Interest, Fifth Edition, U.S. Department of Health and Human Services, NIH Publication No. 91-3242; IMGT®, the international ImMunoGeneTics information System® imgt.org, Lefranc, M.-P. et al., Nucleic Acids Res., 27:209-212 (1999); Ruiz, M. et al., Nucleic Acids Res., 28:219-221 (2000); Lefranc, M.-P., Nucleic Acids Res., 29:207-209 (2001); Lefranc, M.-P., Nucleic Acids Res., 31:307-310 (2003); Lefranc, M.-P. et al., In Silico Biol., 5, 0006 (2004) [Epub], 5:45-60 (2005); Lefranc, M.-P. et al., Nucleic Acids Res., 33:D593-597 (2005); Lefranc, M.-P. et al., Nucleic Acids Res., 37:D1006-1012 (2009); Lefranc, M.-P. et al., Nucleic Acids Res., 43:D413-422 (2015); Chothia et al., (1989) Nature 342:877; Chothia, C. et al. (1987) J. Mol. Biol. 196:901-917, Al-lazikani et al (1997) J. Molec. Biol. 273:927-948; and Almagro, J. Mol. Recognit. 17:132-143 (2004). See also hgmp.mrc.ac.uk and bioinf.org.uk/abs. As used herein, a CDR may refer to the CDR defined by any method known in the art. Two antibodies having the same CDR means that the two antibodies have the same amino acid sequence of that CDR as determined by the same method, for example, the IMGT definition.

[0054] There are three CDRs in each of the variable regions of the heavy chain and the light chain, which are designated CDR1, CDR2 and CDR3, for each of the variable regions. The term “CDR set” as used herein refers to a group of three CDRs that occur in a single variable region capable of binding the antigen. The exact boundaries of these CDRs have been defined differently according to different systems. The system described by Kabat (Kabat et al., Sequences of Proteins of Immunological Interest (National Institutes of Health, Bethesda, Md. (1987) and (1991)) not only provides an unambiguous residue numbering system applicable to any variable region of an antibody, but also provides precise residue boundaries defining the three CDRs. These CDRs may be referred to as Kabat CDRs. Sub-portions of CDRs may be designated as L1, L2 and L3 or H1, H2 and H3 where the “L” and the “H” designates the light chain and the heavy chains regions, respectively. These regions may be referred to as Chothia CDRs, which have boundaries that overlap with Kabat CDRs. Other boundaries defining CDRs overlapping with the Kabat CDRs have been described by Padlan (FASEB J. 9:133-139 (1995)) and MacCallum (J Mol Biol 262(5):732-45 (1996)). Still other CDR boundary definitions may not strictly follow one of the above systems, but will nonetheless overlap with the Kabat CDRs, although they may be shortened or lengthened in light of prediction or experimental findings that particular residues or groups of residues or even entire CDRs do not significantly impact antigen binding. The methods used herein may utilize CDRs defined according to any of these systems. Examples of CDR definition systems are provided in Table 1.

TABLE 1
CDR Definitions

| | IMGT¹ | Kabat² | Chothia³ |
|---|---|---|---|
| CDR-H1 | 27-38 | 31-35 | 26-32 |
| CDR-H2 | 56-65 | 50-65 | 53-55 |
| CDR-H3 | 105-116/117 | 95-102 | 96-101 |
| CDR-L1 | 27-38 | 24-34 | 26-32 |
| CDR-L2 | 56-65 | 50-56 | 50-52 |
| CDR-L3 | 105-116/117 | 89-97 | 91-96 |

¹IMGT ®, the international ImMunoGeneTics information system ®, imgt.org, Lefranc, M.-P. et al., Nucleic Acids Res., 27: 209-212 (1999)
²Kabat et al. (1991) Sequences of Proteins of Immunological Interest, Fifth Edition, U.S. Department of Health and Human Services, NIH Publication No. 91-3242
³Chothia et al., J. Mol. Biol. 196: 901-917 (1987))

[0055] CDR-grafted antibody: The term “CDR-grafted antibody” refers to antibodies which comprise heavy and light chain variable region sequences from one species but in which the sequences of one or more of the CDR regions of VH and/or (e.g., and) VL are replaced with CDR sequences of another species, such as antibodies having murine heavy and light chain variable regions in which one or more of the murine CDRs (e.g., CDR3) has been replaced with human CDR sequences.

[0056] Chimeric antibody: The term “chimeric antibody” refers to antibodies which comprise heavy and light chain variable region sequences from one species and constant region sequences from another species, such as antibodies having murine heavy and light chain variable regions linked to human constant regions.

[0057] Complementary: As used herein, the term “complementary” refers to the capacity for precise pairing between two nucleotides or two sets of nucleotides. In particular, complementary is a term that characterizes an extent of hydrogen bond pairing that brings about binding between two nucleotides or two sets of nucleotides. The term “complementary” may also refer to the capacity for precise pairing between two nucleosides or two sets of nucleosides. In particular, complementary is a term that characterizes an extent of hydrogen bond pairing that brings about binding between two nucleosides or two sets of nucleosides. For example, if a base at one position of an oligonucleotide is capable of hydrogen bonding with a base at the corresponding position of a target nucleic acid (e.g., an mRNA), then the bases are considered to be complementary to each other at that position. Base pairings may include both canonical Watson-Crick base pairing and non-Watson-Crick base pairing (e.g., Wobble base pairing and Hoogsteen base pairing). For example, in some embodiments, for complementary base pairings, adenosine-type bases (A) are complementary to thymidine-type bases (T) or uracil-type bases (U), that cytosine-type bases (C) are complementary to guanosine-type bases (G), and that universal bases such as 3-nitropyrrole or 5-nitroindole can hybridize to and are considered complementary to any A, C, U, or T. Inosine (I) has also been considered in the art to be a universal base and is considered complementary to any A, C, U or T.

[0058] Conservative amino acid substitution: As used herein, a “conservative amino acid substitution” refers to an amino acid substitution that does not alter the relative charge or size characteristics of the protein in which the amino acid substitution is made. Variants can be prepared according to methods for altering polypeptide sequence known to one of ordinary skill in the art such as are found in references which compile such methods, e.g. Molecular Cloning: A Laboratory Manual, J. Sambrook, et al., eds., Fourth Edition, Cold Spring Harbor Laboratory Press, Cold Spring Harbor, New York, 2012, or Current Protocols in Molecular Biology, F. M. Ausubel, et al., eds., John Wiley & Sons, Inc., New York. Conservative substitutions of amino acids include substitutions made amongst amino acids within the following groups: (a) M, I, L, V; (b) F, Y, W; (c) K, R, H; (d) A, G; (e) I S, T; (f) Q, N; and (g) E, D.

[0059] Covalently linked: As used herein, the term “covalently linked” refers to a characteristic of two or more molecules being linked together via at least one covalent bond. In some embodiments, two molecules can be covalently linked together by a single bond, e.g., a disulfide bond or disulfide bridge, that serves as a linker between the molecules. However, in some embodiments, two or more molecules can be covalently linked together via a molecule that serves as a linker that joins the two or more molecules together through multiple covalent bonds. In some embodiments, a linker may be a cleavable linker. However, in some embodiments, a linker may be a non-cleavable linker.

[0060] Cross-reactive: As used herein and in the context of a targeting agent (e.g., antibody), the term “cross-reactive,” refers to a property of the agent being capable of specifically binding to more than one antigen of a similar type or class (e.g., antigens of multiple homologs, paralogs, or orthologs) with similar affinity or avidity. For example, in some embodiments, an antibody that is cross-reactive against human and non-human primate antigens of a similar type or class (e.g., a human transferrin receptor and non-human primate transferrin receptor) is capable of binding to the human antigen and non-human primate antigens with a similar affinity or avidity. In some embodiments, an antibody is cross-reactive against a human antigen and a rodent antigen of a similar type or class. In some embodiments, an antibody is cross-reactive against a rodent antigen and a non-human primate antigen of a similar type or class. In some embodiments, an antibody is cross-reactive against a human antigen, a non-human primate antigen, and a rodent antigen of a similar type or class.

[0061] DUX4: As used herein, the term “DUX4” refers to a gene that encodes double homeobox 4, a protein which is generally expressed during fetal development and in the testes of adult males. In some embodiments, DUX4 may be a human (Gene ID: 100288687), non-human primate (e.g., Gene ID: 750891, Gene ID: 100405864), or rodent gene (e.g., Gene ID: 306226). In humans, expression of the DUX4 gene outside of fetal development and the testes is associated with facioscapulohumeral muscular dystrophy. In addition, multiple human transcript variants (e.g., as annotated under GenBank RefSeq Accession Numbers: NM_001293798.2, NM_001306068.2, NM_001363820.1) have been characterized that encode different protein isoforms.

[0062] Facioscapulohumeral muscular dystrophy (FSHD): As used herein, the term “facioscapulohumeral muscular dystrophy (FSHD)” refers to a genetic disease caused by mutations in the DUX4 gene or SMCHD1 gene that is characterized by muscle mass loss and muscle atrophy, primarily in the muscles of the face, shoulder blades, and upper arms. Two types of the disease, Type 1 and Type 2, have been described. Type 1 is associated with deletions in D4Z4 repeat regions on chromosome 4 which contains the DUX4 gene. In some embodiments, Type 1 is associated with deletions in D4Z4 repeat regions on chromosome 4 allelic variant 4qA which contains the DUX4 gene. Type 2 is associated with mutations in the SMCHD1 gene. Both Type 1 and Type 2 FSHD are characterized by aberrant production of the DUX4 protein after fetal development outside of the testes. Facioscapulohumeral dystrophy, the genetic basis for the disease, and related symptoms are described in the art (see, e.g. Campbell, A. E., et al., “Facioscapulohumeral dystrophy: Activating an early embryonic transcriptional program in human skeletal muscle” Human Mol Genet. (2018); and Tawil, R. “Facioscapulohumeral muscular dystrophy” Handbook Clin. Neurol. (2018), 148: 541-548.) FSHD Type 1 is associated with Online Mendelian Inheritance in Man (OMIM) Entry #158900. FSHD Type 2 is associated with OMIM Entry #158901.

[0063] Framework: As used herein, the term “framework” or “framework sequence” refers to the remaining sequences of a variable region minus the CDRs. Because the exact definition of a CDR sequence can be determined by different systems, the meaning of a framework sequence is subject to correspondingly different interpretations. The six CDRs (CDR-L1, CDR-L2, and CDR-L3 of light chain and CDR-H1, CDR-H2, and CDR-H3 of heavy chain) also divide the framework regions on the light chain and the heavy chain into four sub-regions (FR1, FR2, FR3 and FR4) on each chain, in which CDR1 is positioned between FR1 and FR2, CDR2 between FR2 and FR3, and CDR3 between FR3 and FR4. Without specifying the particular sub-regions as FR1, FR2, FR3 or FR4, a framework region, as referred by others, represents the combined FRs within the variable region of a single, naturally occurring immunoglobulin chain. As used herein, a FR represents one of the four sub-regions, and FRs represents two or more of the four sub-regions constituting a framework region. Human heavy chain and light chain acceptor sequences are known in the art. In one embodiment, the acceptor sequences known in the art may be used in the antibodies disclosed herein.

[0064] Human antibody: The term “human antibody”, as used herein, is intended to include antibodies having variable and constant regions derived from human germline immunoglobulin sequences. The human antibodies of the disclosure may include amino acid residues not encoded by human germline immunoglobulin sequences (e.g., mutations introduced by random or site-specific mutagenesis in vitro or by somatic mutation in vivo), for example in the CDRs and in particular CDR3. However, the term “human antibody”, as used herein, is not intended to include antibodies in which CDR sequences derived from the germline of another mammalian species, such as a mouse, have been grafted onto human framework sequences.

[0065] Humanized antibody: The term “humanized antibody” refers to antibodies which comprise heavy and light chain variable region sequences from a non-human species (e.g., a mouse) but in which at least a portion of the VH and/or (e.g., and) VL sequence has been altered to be more “human-like”, i.e., more similar to human germline variable sequences. One type of humanized antibody is a CDR-grafted antibody, in which human CDR sequences are introduced into non-human VH and VL sequences to replace the corresponding non-human CDR sequences. In one embodiment, humanized anti-transferrin receptor antibodies and antigen binding portions are provided. Such antibodies may be generated by obtaining murine anti-transferrin receptor monoclonal antibodies using traditional hybridoma technology followed by humanization using in vitro genetic engineering, such as those disclosed in Kasaian et al PCT publication No. WO 2005/123126 A2.

[0066] Internalizing cell surface receptor: As used herein, the term, “internalizing cell surface receptor” refers to a cell surface receptor that is internalized by cells, e.g., upon external stimulation, e.g., ligand binding to the receptor. In some embodiments, an internalizing cell surface receptor is internalized by endocytosis. In some embodiments, an internalizing cell surface receptor is internalized by clathrin-mediated endocytosis. However, in some embodiments, an internalizing cell surface receptor is internalized by a clathrin-independent pathway, such as, for example, phagocytosis, macropinocytosis, caveolae- and raft-mediated uptake or constitutive clathrin-independent endocytosis. In some embodiments, the internalizing cell surface receptor comprises an intracellular domain, a transmembrane domain, and/or (e.g., and) an extracellular domain, which may optionally further comprise a ligand-binding domain. In some embodiments, a cell surface receptor becomes internalized by a cell after ligand binding. In some embodiments, a ligand may be a muscle-targeting agent or a muscle-targeting antibody. In some embodiments, an internalizing cell surface receptor is a transferrin receptor.

[0067] Isolated antibody: An “isolated antibody”, as used herein, is intended to refer to an antibody that is substantially free of other antibodies having different antigenic specificities (e.g., an isolated antibody that specifically binds transferrin receptor is substantially free of antibodies that specifically bind antigens other than transferrin receptor). An isolated antibody that specifically binds transferrin receptor complex may, however, have cross-reactivity to other antigens, such as transferrin receptor molecules from other species. Moreover, an isolated antibody may be substantially free of other cellular material and/or (e.g., and) chemicals.

[0068] Kabat numbering: The terms “Kabat numbering”, “Kabat definitions and “Kabat labeling” are used interchangeably herein. These terms, which are recognized in the art, refer to a system of numbering amino acid residues which are more variable (i.e. hypervariable) than other amino acid residues in the heavy and light chain variable regions of an antibody, or an antigen binding portion thereof (Kabat et al. (1971) Ann. NY Acad, Sci. 190:382-391 and, Kabat, E. A., et al. (1991) Sequences of Proteins of Immunological Interest, Fifth Edition, U.S. Department of Health and Human Services, NIH Publication No. 91-3242). For the heavy chain variable region, the hypervariable region ranges from amino acid positions 31 to 35 for CDR1, amino acid positions 50 to 65 for CDR2, and amino acid positions 95 to 102 for CDR3. For the light chain variable region, the hypervariable region ranges from amino acid positions 24 to 34 for CDR1, amino acid positions 50 to 56 for CDR2, and amino acid positions 89 to 97 for CDR3.

[0069] Molecular payload: As used herein, the term “molecular payload” refers to a molecule or species that functions to modulate a biological outcome. In some embodiments, a molecular payload is linked to, or otherwise associated with a muscle-targeting agent. In some embodiments, the molecular payload is a small molecule, a protein, a peptide, a nucleic acid, or an oligonucleotide. In some embodiments, the molecular payload functions to modulate the transcription of a DNA sequence, to modulate the expression of a protein, or to modulate the activity of a protein. In some embodiments, the molecular payload is an oligonucleotide that comprises a strand having a region of complementarity to a target gene.

[0070] Muscle-targeting agent: As used herein, the term, “muscle-targeting agent,” refers to a molecule that specifically binds to an antigen expressed on muscle cells. The antigen in or on muscle cells may be a membrane protein, for example an integral membrane protein or a peripheral membrane protein. Typically, a muscle-targeting agent specifically binds to an antigen on muscle cells that facilitates internalization of the muscle-targeting agent (and any associated molecular payload) into the muscle cells. In some embodiments, a muscle-targeting agent specifically binds to an internalizing, cell surface receptor on muscles and is capable of being internalized into muscle cells through receptor mediated internalization. In some embodiments, the muscle-targeting agent is a small molecule, a protein, a peptide, a nucleic acid (e.g., an aptamer), or an antibody. In some embodiments, the muscle-targeting agent is linked to a molecular payload.

[0071] Muscle-targeting antibody: As used herein, the term, “muscle-targeting antibody,” refers to a muscle-targeting agent that is an antibody that specifically binds to an antigen found in or on muscle cells. In some embodiments, a muscle-targeting antibody specifically binds to an antigen on muscle cells that facilitates internalization of the muscle-targeting antibody (and any associated molecular payment) into the muscle cells. In some embodiments, the muscle-targeting antibody specifically binds to an internalizing, cell surface receptor present on muscle cells. In some embodiments, the muscle-targeting antibody is an antibody that specifically binds to a transferrin receptor.

[0072] Oligonucleotide: As used herein, the term “oligonucleotide” refers to an oligomeric nucleic acid compound of up to 200 nucleotides in length. Examples of oligonucleotides include, but are not limited to, RNAi oligonucleotides (e.g., siRNAs, shRNAs), microRNAs, gapmers, mixmers, phosphorodiamidate morpholinos, peptide nucleic acids, aptamers, guide nucleic acids (e.g., Cas9 guide RNAs), etc. Oligonucleotides may be single-stranded or double-stranded. In some embodiments, an oligonucleotide may comprise one or more modified nucleotides (e.g. 2′-O-methyl sugar modifications, purine or pyrimidine modifications). In some embodiments, an oligonucleotide may comprise one or more modified nucleosides (e.g. 2′-O-methyl sugar modifications, purine or pyrimidine modifications). In some embodiments, an oligonucleotide may comprise one or more modified internucleotide linkages. In some embodiments, an oligonucleotide may comprise one or more modified internucleoside linkages. In some embodiments, an oligonucleotide may comprise one or more phosphorothioate linkages, which may be in the Rp or Sp stereochemical conformation.

[0073] Recombinant antibody: The term “recombinant human antibody”, as used herein, is intended to include all human antibodies that are prepared, expressed, created or isolated by recombinant means, such as antibodies expressed using a recombinant expression vector transfected into a host cell (described in more details in this disclosure), antibodies isolated from a recombinant, combinatorial human antibody library (Hoogenboom H. R., (1997) TIB Tech. 15:62-70; Azzazy H., and Highsmith W. E., (2002) Clin. Biochem. 35:425-445; Gavilondo J. V., and Larrick J. W. (2002) BioTechniques 29:128-145; Hoogenboom H., and Chames P. (2000) Immunology Today 21:371-378), antibodies isolated from an animal (e.g., a mouse) that is transgenic for human immunoglobulin genes (see e.g., Taylor, L. D., et al. (1992) Nucl. Acids Res. 20:6287-6295; Kellermann S-A., and Green L. L. (2002) Current Opinion in Biotechnology 13:593-597; Little M. et al (2000) Immunology Today 21:364-370) or antibodies prepared, expressed, created or isolated by any other means that involves splicing of human immunoglobulin gene sequences to other DNA sequences. Such recombinant human antibodies have variable and constant regions derived from human germline immunoglobulin sequences. In certain embodiments, however, such recombinant human antibodies are subjected to in vitro mutagenesis (or, when an animal transgenic for human Ig sequences is used, in vivo somatic mutagenesis) and thus the amino acid sequences of the VH and VL regions of the recombinant antibodies are sequences that, while derived from and related to human germline VH and VL sequences, may not naturally exist within the human antibody germline repertoire in vivo. One embodiment of the disclosure provides fully human antibodies capable of binding human transferrin receptor which can be generated using techniques well known in the art, such as, but not limited to, using human Ig phage libraries such as those disclosed in Jermutus et al., PCT publication No. WO 2005/007699 A2.

[0074] Region of complementarity: As used herein, the term “region of complementarity” refers to a nucleotide sequence, e.g., of an oligonucleotide, that is sufficiently complementary to a cognate nucleotide sequence, e.g., of a target nucleic acid, such that the two nucleotide sequences are capable of annealing to one another under physiological conditions (e.g., in a cell). In some embodiments, a region of complementarity is fully complementary to a cognate nucleotide sequence of target nucleic acid. However, in some embodiments, a region of complementarity is partially complementary to a cognate nucleotide sequence of target nucleic acid (e.g., at least 80%, 90%, 95% or 99% complementarity). In some embodiments, a region of complementarity contains 1, 2, 3, or 4 mismatches compared with a cognate nucleotide sequence of a target nucleic acid.

[0075] Specifically binds: As used herein, the term “specifically binds” refers to the ability of a molecule to bind to a binding partner with a degree of affinity or avidity that enables the molecule to be used to distinguish the binding partner from an appropriate control in a binding assay or other binding context. With respect to an antibody, the term, “specifically binds”, refers to the ability of the antibody to bind to a specific antigen with a degree of affinity or avidity, compared with an appropriate reference antigen or antigens, that enables the antibody to be used to distinguish the specific antigen from others, e.g., to an extent that permits preferential targeting to certain cells, e.g., muscle cells, through binding to the antigen, as described herein. In some embodiments, an antibody specifically binds to a target if the antibody has a K_{D} for binding the target of at least about 10⁻⁴ M, 10⁻⁵ M, 10⁻⁶ M, 10⁻⁷ M, 10⁻⁸M, 10⁻⁹ M, 10⁻¹⁰ M, 10⁻¹¹ M, 10⁻¹² M, 10⁻¹³ M, or less. In some embodiments, an antibody specifically binds to the transferrin receptor, e.g., an epitope of the apical domain of transferrin receptor.

[0076] Subject: As used herein, the term “subject” refers to a mammal. In some embodiments, a subject is non-human primate, or rodent. In some embodiments, a subject is a human. In some embodiments, a subject is a patient, e.g., a human patient that has or is suspected of having a disease. In some embodiments, the subject is a human patient who has or is suspected of having FSHD.

[0077] Transferrin receptor: As used herein, the term, “transferrin receptor” (also known as TFRC, CD71, p90, TFR, or TFR1) refers to an internalizing cell surface receptor that binds transferrin to facilitate iron uptake by endocytosis. In some embodiments, a transferrin receptor may be of human (NCBI Gene ID 7037), non-human primate (e.g., NCBI Gene ID 711568 or NCBI Gene ID 102136007), or rodent (e.g., NCBI Gene ID 22042) origin. In addition, multiple human transcript variants have been characterized that encoded different isoforms of the receptor (e.g., as annotated under GenBank RefSeq Accession Numbers: NP_001121620.1, NP_003225.2, NP_001300894.1, and NP_001300895.1).

[0078] 2′-modified nucleoside: As used herein, the terms “2′-modified nucleoside” and “2′-modified ribonucleoside” are used interchangeably and refer to a nucleoside having a sugar moiety modified at the 2′ position. In some embodiments, the 2′-modified nucleoside is a 2′-4′ bicyclic nucleoside, where the 2′ and 4′ positions of the sugar are bridged (e.g., via a methylene, an ethylene, or a (S)-constrained ethyl bridge). In some embodiments, the 2′-modified nucleoside is a non-bicyclic 2′-modified nucleoside, e.g., where the 2′ position of the sugar moiety is substituted. Non-limiting examples of 2′-modified nucleosides include: 2′-deoxy, 2′-fluoro (2′-F), 2′-O-methyl (2′-O-Me), 2′-O-methoxyethyl (2′-MOE), 2′-O-aminopropyl (2′-O-AP), 2′-O-dimethylaminoethyl (2′-O-DMAOE), 2′-O-dimethylaminopropyl (2′-O-DMAP), 2′-O-dimethylaminoethyloxyethyl (2′-O-DMAEOE), 2′-O—N-methylacetamido (2′-O-NMA), locked nucleic acid (LNA, methylene-bridged nucleic acid), ethylene-bridged nucleic acid (ENA), and (S)-constrained ethyl-bridged nucleic acid (cEt). In some embodiments, the 2′-modified nucleosides described herein are high-affinity modified nucleosides and oligonucleotides comprising the 2′-modified nucleosides have increased affinity to a target sequence, relative to an unmodified oligonucleotide. Examples of structures of 2′-modified nucleosides are provided below:

[chemical structure]

[0079] These examples are shown with phosphate groups, but any internucleoside linkages are contemplated between 2′-modified nucleosides.

### II. Complexes

[0080] Provided herein are complexes that comprise a targeting agent, e.g. an antibody, covalently linked to a molecular payload. In some embodiments, a complex comprises a muscle-targeting antibody covalently linked to an oligonucleotide. A complex may comprise an antibody that specifically binds a single antigenic site or that binds to at least two antigenic sites that may exist on the same or different antigens.

[0081] A complex may be used to modulate the activity or function of at least one gene, protein, and/or (e.g., and) nucleic acid. In some embodiments, the molecular payload present with a complex is responsible for the modulation of a gene, protein, and/or (e.g., and) nucleic acids. A molecular payload may be a small molecule, protein, nucleic acid, oligonucleotide, or any molecular entity capable of modulating the activity or function of a gene, protein, and/or (e.g., and) nucleic acid in a cell. In some embodiments, a molecular payload is an oligonucleotide that targets a DUX4 in muscle cells.

[0082] In some embodiments, a complex comprises a muscle-targeting agent, e.g. an anti-transferrin receptor antibody, covalently linked to a molecular payload, e.g. an antisense oligonucleotide that targets a DUX4.

[0083] A. Muscle-Targeting Agents

[0084] Some aspects of the disclosure provide muscle-targeting agents, e.g., for delivering a molecular payload to a muscle cell. In some embodiments, such muscle-targeting agents are capable of binding to a muscle cell, e.g., via specifically binding to an antigen on the muscle cell, and delivering an associated molecular payload to the muscle cell. In some embodiments, the molecular payload is bound (e.g., covalently bound) to the muscle targeting agent and is internalized into the muscle cell upon binding of the muscle targeting agent to an antigen on the muscle cell, e.g., via endocytosis. It should be appreciated that various types of muscle-targeting agents may be used in accordance with the disclosure. It should also be appreciated that any muscle targets (e.g., muscle surface proteins) can be targeted by any type of muscle-targeting agent described herein. For example, the muscle-targeting agent may comprise, or consist of, a nucleic acid (e.g., DNA or RNA), a peptide (e.g., an antibody), a lipid (e.g., a microvesicle), or a sugar moiety (e.g., a polysaccharide). In some embodiments, the muscle-targeting agent may comprise, or consist of, a small molecule. Exemplary muscle-targeting agents are described in further detail herein, however, it should be appreciated that the exemplary muscle-targeting agents provided herein are not meant to be limiting.

[0085] Some aspects of the disclosure provide muscle-targeting agents that specifically bind to an antigen on muscle, such as skeletal muscle, smooth muscle, or cardiac muscle. In some embodiments, any of the muscle-targeting agents provided herein bind to (e.g., specifically bind to) an antigen on a skeletal muscle cell, a smooth muscle cell, and/or (e.g., and) a cardiac muscle cell.

[0086] By interacting with muscle-specific cell surface recognition elements (e.g., cell membrane proteins), both tissue localization and selective uptake into muscle cells can be achieved. In some embodiments, molecules that are substrates for muscle uptake transporters are useful for delivering a molecular payload into muscle tissue. Binding to muscle surface recognition elements followed by endocytosis can allow even large molecules such as antibodies to enter muscle cells. As another example molecular payloads conjugated to transferrin or anti-transferrin receptor antibodies can be taken up by muscle cells via binding to transferrin receptor, which may then be endocytosed, e.g., via clathrin-mediated endocytosis.

[0087] The use of muscle-targeting agents may be useful for concentrating a molecular payload (e.g., oligonucleotide) in muscle while reducing toxicity associated with effects in other tissues. In some embodiments, the muscle-targeting agent concentrates a bound molecular payload in muscle cells as compared to another cell type within a subject. In some embodiments, the muscle-targeting agent concentrates a bound molecular payload in muscle cells (e.g., skeletal, smooth, or cardiac muscle cells) in an amount that is at least 1, 2, 3, 4, 5, 6, 7, 8, 9, 10, 15, 20, 30, 40, 50, 60, 70, 80, 90, or 100 times greater than an amount in non-muscle cells (e.g., liver, neuronal, blood, or fat cells). In some embodiments, a toxicity of the molecular payload in a subject is reduced by at least 1%, 2%, 3%, 4%, 5%, 10%, 15%, 20%, 25%, 30%, 35%, 40%, 45%, 50%, 55%, 60%, 65%, 70%, 75%, 80%, 90%, or 95% when it is delivered to the subject when bound to the muscle-targeting agent.

[0088] In some embodiments, to achieve muscle selectivity, a muscle recognition element (e.g., a muscle cell antigen) may be required. As one example, a muscle-targeting agent may be a small molecule that is a substrate for a muscle-specific uptake transporter. As another example, a muscle-targeting agent may be an antibody that enters a muscle cell via transporter-mediated endocytosis. As another example, a muscle targeting agent may be a ligand that binds to cell surface receptor on a muscle cell. It should be appreciated that while transporter-based approaches provide a direct path for cellular entry, receptor-based targeting may involve stimulated endocytosis to reach the desired site of action.

[0089] i. Muscle-Targeting Antibodies

[0090] In some embodiments, the muscle-targeting agent is an antibody. Generally, the high specificity of antibodies for their target antigen provides the potential for selectively targeting muscle cells (e.g., skeletal, smooth, and/or (e.g., and) cardiac muscle cells). This specificity may also limit off-target toxicity. Examples of antibodies that are capable of targeting a surface antigen of muscle cells have been reported and are within the scope of the disclosure. For example, antibodies that target the surface of muscle cells are described in Arahata K., et al. “Immunostaining of skeletal and cardiac muscle surface membrane with antibody against Duchenne muscular dystrophy peptide” Nature 1988; 333: 861-3; Song K. S., et al. “Expression of caveolin-3 in skeletal, cardiac, and smooth muscle cells. Caveolin-3 is a component of the sarcolemma and co-fractionates with dystrophin and dystrophin-associated glycoproteins” J Biol Chem 1996; 271: 15160-5; and Weisbart R. H. et al., “Cell type specific targeted intracellular delivery into muscle of a monoclonal antibody that binds myosin IIb” Mol Immunol. 2003 March, 39(13):783-9; the entire contents of each of which are incorporated herein by reference.

[0091] a. Anti-Transferrin Receptor (TfR) Antibodies

[0092] Some aspects of the disclosure are based on the recognition that agents binding to transferrin receptor, e.g., anti-transferrin-receptor antibodies, are capable of targeting muscle cell. Transferrin receptors are internalizing cell surface receptors that transport transferrin across the cellular membrane and participate in the regulation and homeostasis of intracellular iron levels. Some aspects of the disclosure provide transferrin receptor binding proteins, which are capable of binding to transferrin receptor. Accordingly, aspects of the disclosure provide binding proteins (e.g., antibodies) that bind to transferrin receptor. In some embodiments, binding proteins that bind to transferrin receptor are internalized, along with any bound molecular payload, into a muscle cell. As used herein, an antibody that binds to a transferrin receptor may be referred to interchangeably as a transferrin receptor antibody, an anti-transferrin receptor antibody, or an anti-TfR antibody. Antibodies that bind, e.g. specifically bind, to a transferrin receptor may be internalized into the cell, e.g. through receptor-mediated endocytosis, upon binding to a transferrin receptor.

[0093] It should be appreciated that anti-TfR antibodies may be produced, synthesized, and/or (e.g., and) derivatized using several known methodologies, e.g. library design using phage display. Exemplary methodologies have been characterized in the art and are incorporated by reference (Diez, P. et al. “High-throughput phage-display screening in array format”, Enzyme and Microbial Technology, 2015, 79, 34-41.; Christoph M. H. and Stanley, J. R. “Antibody Phage Display: Technique and Applications” J Invest Dermatol. 2014, 134:2.; Engleman, Edgar (Ed.) “Human Hybridomas and Monoclonal Antibodies.” 1985, Springer.). In other embodiments, an anti-TfR antibody has been previously characterized or disclosed. Antibodies that specifically bind to transferrin receptor are known in the art (see, e.g. U.S. Pat. No. 4,364,934, filed Dec. 4, 1979, “Monoclonal antibody to a human early thymocyte antigen and methods for preparing same”; U.S. Pat. No. 8,409,573, filed Jun. 14, 2006, “Anti-CD71 monoclonal antibodies and uses thereof for treating malignant tumor cells”; U.S. Pat. No. 9,708,406, filed May 20, 2014, “Anti-transferrin receptor antibodies and methods of use”; U.S. Pat. No. 9,611,323, filed Dec. 19, 2014, “Low affinity blood brain barrier receptor antibodies and uses therefor”; WO 2015/098989, filed Dec. 24, 2014, “Novel anti-transferrin receptor antibody that passes through blood-brain barrier”; Schneider C. et al. “Structural features of the cell surface receptor for transferrin that is recognized by the monoclonal antibody OKT9.” J Biol Chem. 1982, 257:14, 8516-8522.; Lee et al. “Targeting Rat Anti-Mouse Transferrin Receptor Monoclonal Antibodies through Blood-Brain Barrier in Mouse” 2000, J Pharmacol. Exp. Ther., 292: 1048-1052).

[0094] In some embodiments, the anti-TfR antibody described herein binds to transferrin receptor with high specificity and affinity. In some embodiments, the anti-TfR antibody described herein specifically binds to any extracellular epitope of a transferrin receptor or an epitope that becomes exposed to an antibody. In some embodiments, anti-TfR antibodies provided herein bind specifically to transferrin receptor from human, non-human primates, mouse, rat, etc. In some embodiments, anti-TfR antibodies provided herein bind to human transferrin receptor. In some embodiments, the anti-TfR antibody described herein binds to an amino acid segment of a human or non-human primate transferrin receptor, as provided in SEQ ID NOs: 105-108. In some embodiments, the anti-TfR antibody described herein binds to an amino acid segment corresponding to amino acids 90-96 of a human transferrin receptor as set forth in SEQ ID NO: 105, which is not in the apical domain of the transferrin receptor.

[0095] In some embodiments, the anti-TfR1 antibodies described herein (e.g., Anti-TfR clone 8 in Table 2 below) bind an epitope in TfR1, wherein the epitope comprises residues in amino acids 214-241 and/or amino acids 354-381 of SEQ ID NO: 105. In some embodiments, the anti-TfR1 antibodies described herein bind an epitope comprising residues in amino acids 214-241 and amino acids 354-381 of SEQ ID NO: 105. In some embodiments, the anti-TfR1 antibodies described herein bind an epitope comprising one or more of residues Y222, T227, K231, H234, T367, S368, S370, T376, and S378 of human TfR1 as set forth in SEQ ID NO: 105. In some embodiments, the anti-TfR1 antibodies described herein bind an epitope comprising residues Y222, T227, K231, H234, T367, S368, S370, T376, and S378 of human TfR1 as set forth in SEQ ID NO: 105.

[0096] In some embodiments, the anti-TfR1 antibody described herein (e.g., 3M12 in Table 2 below and its variants) bind an epitope in TfR1, wherein the epitope comprises residues in amino acids 258-291 and/or amino acids 358-381 of SEQ ID NO: 105. In some embodiments, the anti-TfR1 antibodies (e.g., 3M12 in Table 2 below and its variants) described herein bind an epitope comprising residues in amino acids amino acids 258-291 and amino acids 358-381 of SEQ ID NO: 105. In some embodiments, the anti-TfR1 antibodies described herein (e.g., 3M12 in Table 2 below and its variants) bind an epitope comprising one or more of residues K261, S273, Y282, T362, S368, S370, and K371 of human TfR1 as set forth in SEQ ID NO: 105. In some embodiments, the anti-TfR1 antibodies described herein (e.g., 3M12 in Table 2 below and its variants) bind an epitope comprising residues K261, S273, Y282, T362, S368, S370, and K371 of human TfR1 as set forth in SEQ ID NO: 105.

[0097] An example human transferrin receptor amino acid sequence, corresponding to NCBI sequence NP_003225.2 (transferrin receptor protein 1 isoform 1, Homo sapiens) is as follows:

(SEQ ID NO: 105)
MMDQARSAFSNLFGGEPLSYTRFSLARQVDGDNSHVEMKL
AVDEEENADNNTKANVTKPKRCSGSICYGTIAVIVFFLIG
FMIGYLGYCKGVEPKTECERLAGTESPVREEPGEDFPAAR
RLYWDDLKRKLSEKLDSTDFTGTIKLLNENSYVPREAGSQ
KDENLALYVENQFREFKLSKVWRDQHFVKIQVKDSAQNSV
IIVDKNGRLVYLVENPGGYVAYSKAATVTGKLVHANFGTK
KDFEDLYTPVNGSIVIVRAGKITFAEKVANAESLNAIGVL
IYMDQTKFPIVNAELSFFGHAHLGTGDPYTPGFPSFNHTQ
FPPSRSSGLPNIPVQTISRAAAEKLFGNMEGDCPSDWKTD
STCRMVTSESKNVKLTVSNVLKEIKILNIFGVIKGFVEPD
HYVVVGAQRDAWGPGAAKSGVGTALLLKLAQMFSDMVLKD
GFQPSRSIIFASWSAGDFGSVGATEWLEGYLSSLHLKAFT
YINLDKAVLGTSNFKVSASPLLYTLIEKTMQNVKHPVTGQ
FLYQDSNWASKVEKLTLDNAAFPFLAYSGIPAVSFCFCED
TDYPYLGTTMDTYKELIERIPELNKVARAAAEVAGQFVIK
LTHDVELNLDYERYNSQLLSFVRDLNQYRADIKEMGLSLQ
WLYSARGDFFRATSRLTTDFGNAEKTDRFVMKKLNDRVMR
VEYHFLSPYVSPKESPFRHVFWGSGSHTLPALLENLKLRK
QNNGAFNETLFRNQLALATWTIQGAANALSGDVWDIDNEF

[0098] An example non-human primate transferrin receptor amino acid sequence, corresponding to NCBI sequence NP_001244232.1 (transferrin receptor protein 1, Macaca mulatta) is as follows:

(SEQ ID NO: 106)
MMDQARSAFSNLFGGEPLSYTRFSLARQVDGDNSHVEMKL
GVDEEENTDNNTKPNGTKPKRCGGNICYGTIAVIIFFLI
GFMIGYLGYCKGVEPKTECERLAGTESPAREEPEEDFPAA
PRLYWDDLKRKLSEKLDTTDFTSTIKLLNENLYVPREAGS
QKDENLALYIENQFREFKLSKVWRDQHFVKIQVKDSAQN
SVIIVDKNGGLVYLVENPGGYVAYSKAATVTGKLVHANFG
TKKDFEDLDSPVNGSIVIVRAGKITFAEKVANAESLNAIG
VLIYMDQTKFPIVKADLSFFGHAHLGTGDPYTPGFPSFNH
TQFPPSQSSGLPNIPVQTISRAAAEKLFGNMEGDCPSDWK
TDSTCKMVTSENKSVKLTVSNVLKETKILNIFGVIKGFVE
PDHYVVVGAQRDAWGPGAAKSSVGTALLLKLAQMFSDMVL
KDGFQPSRSIIFASWSAGDFGSVGATEWLEGYLSSLHLKA
FTYINLDKAVLGTSNFKVSASPLLYTLIEKTMQDVKHPVT
GRSLYQDSNWASKVEKLTLDNAAFPFLAYSGIPAVSFCFC
EDTDYPYLGTTMDTYKELVERIPELNKVARAAAEVAGQF
VIKLTHDTELNLDYERYNSQLLLFLRDLNQYRADVKEMGL
SLQWLYSARGDFFRATSRLTTDFRNAEKRDKFVMKKLNDR
VMRVEYYFLSPYVSPKESPFRHVFWGSGSHTLSALLESLK
LRRQNNSAFNETLFRNQLALATWTIQGAANALSGDVWDID
NEF

[0099] An example non-human primate transferrin receptor amino acid sequence, corresponding to NCBI sequence XP_005545315.1 (transferrin receptor protein 1, Macaca fascicularis) is as follows:

(SEQ ID NO: 107)
MMDQARSAFSNLFGGEPLSYTRFSLARQVDGDNSHVEMKL
GVDEEENTDNNTKANGTKPKRCGGNICYGTIAVIIFFLI
GFMIGYLGYCKGVEPKTECERLAGTESPAREEPEEDFPAA
PRLYWDDLKRKLSEKLDTTDFTSTIKLLNENLYVPREAGS
QKDENLALYIENQFREFKLSKVWRDQHFVKIQVKDSAQN
SVIIVDKNGGLVYLVENPGGYVAYSKAATVTGKLVHANFG
TKKDFEDLDSPVNGSIVIVRAGKITFAEKVANAESLNAIG
VLIYMDQTKFPIVKADLSFFGHAHLGTGDPYTPGFPSFNH
TQFPPSQSSGLPNIPVQTISRAAAEKLFGNMEGDCPSDWK
TDSTCKMVTSENKSVKLTVSNVLKETKILNIFGVIKGFVE
PDHYVVVGAQRDAWGPGAAKSSVGTALLLKLAQMFSDMVL
KDGFQPSRSIIFASWSAGDFGSVGATEWLEGYLSSLHLKA
FTYINLDKAVLGTSNFKVSASPLLYTLIEKTMQDVKHPVT
GRSLYQDSNWASKVEKLTLDNAAFPFLAYSGIPAVSFCFC
EDTDYPYLGTTMDTYKELVERIPELNKVARAAAEVAGQF
VIKLTHDTELNLDYERYNSQLLLFLRDLNQYRADVKEMGL
SLQWLYSARGDFFRATSRLTTDFRNAEKRDKFVMKKLNDR
VMRVEYYFLSPYVSPKESPFRHVFWGSGSHTLSALLESL
KLRRQNNSAFNETLFRNQLALATWTIQGAANALSGDVWDI
DNEF

[0100] An example mouse transferrin receptor amino acid sequence, corresponding to NCBI sequence NP_001344227.1 (transferrin receptor protein 1, Mus musculus) is as follows:

(SEQ ID NO: 108)
MMDQARSAFSNLFGGEPLSYTRFSLARQVDGDNSHVEMKL
AADEEENADNNMKASVRKPKRFNGRLCFAAIALVIFFLI
GFMSGYLGYCKRVEQKEECVKLAETEETDKSETMETEDV
PTSSRLYWADLKTLLSEKLNSIEFADTIKQLSQNTYTPR
EAGSQKDESLAYYIENQFHEFKFSKVWRDEHYVKIQVKSS
IGQNMVTIVQSNGNLDPVESPEGYVAFSKPTEVSGKLVHA
NFGTKKDFEELSYSVNGSLVIVRAGEITFAEKVANAQSF
NAIGVLIYMDKNKFPVVEADLALFGHAHLGTGDPYTPGFP
SFNHTQFPPSQSSGLPNIPVQTISRAAAEKLFGKMEGSCP
ARWNIDSSCKLELSQNQNVKLIVKNVLKERRILNIFGVIK
GYEEPDRYVVVGAQRDALGAGVAAKSSVGTGLLLKLAQVF
SDMISKDGFRPSRSIIFASWTAGDFGAVGATEWLEGYLSS
LHLKAFTYINLDKVVLGTSNFKVSASPLLYTLMGKIMQDV
KHPVDGKSLYRDSNWISKVEKLSFDNAAYPFLAYSGIPAV
SFCFCEDADYPYLGTRLDTYEALTQKVPQLNQMVRTAAEV
AGQLIIKLTHDVELNLDYEMYNSKLLSFMKDLNQFKTDIR
DMGLSLQWLYSARGDYFRATSRLTTDFHNAEKTNRFVMRE
INDRIMKVEYHFLSPYVSPRESPFRHIFWGSGSHTLSALV
ENLKLRQKNITAFNETLFRNQLALATWTIQGVANALSGDI
WNIDNEF

[0101] In some embodiments, an anti-TfR antibody binds to an amino acid segment of the receptor as follows: FVKIQVKDSAQNSVIIVDKNGRLVYLVENPGGYVAYSKAATVTGKLVHANFGTKKDF EDLYTPVNGSIVIVRAGKITFAEKVANAESLNAIGVLIYMDQTKFPIVNAELSFFGHAH LGTGDPYTPGFPSFNHTQFPPSRSSGLPNIPVQTISRAAAEKLFGNMEGDCPSDWKTDS TCRMVTSESKNVKLTVSNVLKE (SEQ ID NO: 109) and does not inhibit the binding interactions between transferrin receptors and transferrin and/or (e.g., and) human hemochromatosis protein (also known as HFE). In some embodiments, the anti-TfR antibody described herein does not bind an epitope in SEQ ID NO: 109.

[0102] Appropriate methodologies may be used to obtain and/or (e.g., and) produce antibodies, antibody fragments, or antigen-binding agents, e.g., through the use of recombinant DNA protocols. In some embodiments, an antibody may also be produced through the generation of hybridomas (see, e.g., Kohler, G and Milstein, C. “Continuous cultures of fused cells secreting antibody of predefined specificity” Nature, 1975, 256: 495-497). The antigen-of-interest may be used as the immunogen in any form or entity, e.g., recombinant or a naturally occurring form or entity. Hybridomas are screened using standard methods, e.g., ELISA screening, to find at least one hybridoma that produces an antibody that targets a particular antigen. Antibodies may also be produced through screening of protein expression libraries that express antibodies, e.g., phage display libraries. Phage display library design may also be used, in some embodiments, (see, e.g. U.S. Pat. No. 5,223,409, filed Mar. 1, 1991, “Directed evolution of novel binding proteins”; WO 1992/18619, filed Apr. 10, 1992, “Heterodimeric receptor libraries using phagemids”; WO 1991/17271, filed May 1, 1991, “Recombinant library screening methods”; WO 1992/20791, filed May 15, 1992, “Methods for producing members of specific binding pairs”; WO 1992/15679, filed Feb. 28, 1992, and “Improved epitope displaying phage”). In some embodiments, an antigen-of-interest may be used to immunize a non-human animal, e.g., a rodent or a goat. In some embodiments, an antibody is then obtained from the non-human animal, and may be optionally modified using a number of methodologies, e.g., using recombinant DNA techniques. Additional examples of antibody production and methodologies are known in the art (see, e.g. Harlow et al. “Antibodies: A Laboratory Manual”, Cold Spring Harbor Laboratory, 1988.).

[0103] In some embodiments, an antibody is modified, e.g., modified via glycosylation, phosphorylation, sumoylation, and/or (e.g., and) methylation. In some embodiments, an antibody is a glycosylated antibody, which is conjugated to one or more sugar or carbohydrate molecules. In some embodiments, the one or more sugar or carbohydrate molecule are conjugated to the antibody via N-glycosylation, O-glycosylation, C-glycosylation, glypiation (GPI anchor attachment), and/or (e.g., and) phosphoglycosylation. In some embodiments, the one or more sugar or carbohydrate molecules are monosaccharides, disaccharides, oligosaccharides, or glycans. In some embodiments, the one or more sugar or carbohydrate molecule is a branched oligosaccharide or a branched glycan. In some embodiments, the one or more sugar or carbohydrate molecule includes a mannose unit, a glucose unit, an N-acetylglucosamine unit, an N-acetylgalactosamine unit, a galactose unit, a fucose unit, or a phospholipid unit. In some embodiments, there are about 1-10, about 1-5, about 5-10, about 1-4, about 1-3, or about 2 sugar molecules. In some embodiments, a glycosylated antibody is fully or partially glycosylated. In some embodiments, an antibody is glycosylated by chemical reactions or by enzymatic means. In some embodiments, an antibody is glycosylated in vitro or inside a cell, which may optionally be deficient in an enzyme in the N- or O-glycosylation pathway, e.g. a glycosyltransferase. In some embodiments, an antibody is functionalized with sugar or carbohydrate molecules as described in International Patent Application Publication WO2014065661, published on May 1, 2014, entitled, “Modified antibody, antibody-conjugate and process for the preparation thereof”.

[0104] In some embodiments, the anti-TfR antibody of the present disclosure comprises a VL domain and/or (e.g., and) VH domain of any one of the anti-TfR antibodies selected from any one of Tables 2-7, and comprises a constant region comprising the amino acid sequences of the constant regions of an IgG, IgE, IgM, IgD, IgA or IgY immunoglobulin molecule, any class (e.g., IgG1, IgG2, IgG3, IgG4, IgA1 and IgA2), or any subclass (e.g., IgG2a and IgG2b) of immunoglobulin molecule. Non-limiting examples of human constant regions are described in the art, e.g., see Kabat E A et al., (1991) supra.

[0105] In some embodiments, agents binding to transferrin receptor, e.g., anti-TfR antibodies, are capable of targeting muscle cell and/or (e.g., and) mediate the transportation of an agent across the blood brain barrier. Transferrin receptors are internalizing cell surface receptors that transport transferrin across the cellular membrane and participate in the regulation and homeostasis of intracellular iron levels. Some aspects of the disclosure provide transferrin receptor binding proteins, which are capable of binding to transferrin receptor. Antibodies that bind, e.g. specifically bind, to a transferrin receptor may be internalized into the cell, e.g. through receptor-mediated endocytosis, upon binding to a transferrin receptor.

[0106] Provided herein, in some aspects, are antibodies that bind to transferrin receptor with high specificity and affinity. In some embodiments, the anti-TfR antibody described herein specifically binds to any extracellular epitope of a transferrin receptor or an epitope that becomes exposed to an antibody. In some embodiments, the anti-TfR antibodies provided herein bind specifically to transferrin receptor from human, non-human primates, mouse, rat, etc. In some embodiments, the anti-TfR antibodies provided herein bind to human transferrin receptor. In some embodiments, the anti-TfR antibody described herein binds to an amino acid segment of a human or non-human primate transferrin receptor, as provided in SEQ ID NOs: 105-108. In some embodiments, the anti-TfR antibody described herein binds to an amino acid segment corresponding to amino acids 90-96 of a human transferrin receptor as set forth in SEQ ID NO: 105, which is not in the apical domain of the transferrin receptor. In some embodiments, the anti-TfR antibodies described herein binds to TfR1 but does not bind to TfR2.

[0107] In some embodiments, an anti-TFR antibody specifically binds a TfR1 (e.g., a human or non-human primate TfR1) with binding affinity (e.g., as indicated by Kd) of at least about 10⁻⁴ M, 10⁻⁵ M, 10⁻⁶ M, 10⁻⁷ M, 10⁻⁸ M, 10⁻⁹ M, 10⁻¹⁰ M, 10⁻¹¹ M, 10⁻¹² M, 10⁻¹³ M, or less. In some embodiments, the anti-TfR antibodies described herein binds to TfR1 with a KD of sub-nanomolar range. In some embodiments, the anti-TfR antibodies described herein selectively binds to transferrin receptor 1 (TfR1) but do not bind to transferrin receptor 2 (TfR2). In some embodiments, the anti-TfR antibodies described herein binds to human TfR1 and cyno TfR1 (e.g., with a Kd of 10⁻⁷ M, 10⁻⁸ M, 10⁻⁹ M, 10⁻¹⁰ M, 10⁻¹¹ M, 10⁻¹² M, 10⁻¹³ M, or less), but does not bind to a mouse TfR1. The affinity and binding kinetics of the anti-TfR antibody can be tested using any suitable method including but not limited to biosensor technology (e.g., OCTET or BIACORE). In some embodiments, binding ofany one of the anti-TfR antibody described herein does not complete with or inhibit transferrin binding to the TfR1. In some embodiments, binding of any one of the anti-TfR antibody described herein does not complete with or inhibit HFE-beta-2-microglobulin binding to the TfR1.

[0108] Non-limiting examples of anti-TfR antibodies are provided in Table 2.

TABLE 2
Examples of Anti-TfR Antibodies

| | No. | | | |
|---|---|---|---|---|
| Ab | system | IMGT | Kabat | Chothia |
| 3-A4 | CDR- | GFNIKDDY (SEQ ID NO: | DDYMY (SEQ ID NO: 7) | GFNIKDD (SEQ ID NO: |
| | H1 | 1) | | 12) |
| | CDR- | IDPENGDT (SEQ ID NO: | WIDPENGDTEY ASKFQD | ENG (SEQ ID NO: 13) |
| | H2 | 2) | (SEQ ID NO: 8) | |
| | CDR- | TL WLRRGLDY (SEQ ID | WLRRGLDY (SEQ ID NO: | LRRGLD (SEQ ID NO: 14) |
| | H3 | NO: 3) | 9) | |
| | CDR- | KSLLHSNGYTY (SEQ ID | RSSKSLLHSNGYTYLF | SKSLLHSNGYTY (SEQ ID |
| | L1 | NO: 4) | (SEQ ID NO: 10) | NO: 15) |
| | CDR- | RMS (SEQ ID NO: 5) | RMSNLAS (SEQ ID NO: | RMS (SEQ ID NO: 5) |
| | L2 | | 11) | |
| | CDR- | MQHLEYPFT (SEQ ID | MQHLEYPFT (SEQ ID | HLEYPF (SEQ ID NO: 16) |
| | L3 | NO: 6) | NO: 6) | |
| | VH | EVQLQQSGAELVRPGASVKLSCTASGFNIKDDYMYWVKQRPEQGLEWIGWIDPEN | | |
| | | GDTEYASKFQDKATVTADTSSNTAYLQLSSLTSEDTAVYYCTLWLRRGLDYWGQG | | |
| | | TSVTVSS (SEQ ID NO: 17) | | |
| | VL | DIVMTQAAPSVPVTPGESVSISCRSSKSLLHSNGYTYLFWFLQRPGQSPQLLIYRMSN | | |
| | | LASGVPDRFSGSGSGTAFTLRISR VEAEDVGVYYCMQHLEYPFTFGGGTKLEIK | | |
| | | (SEQ ID NO: 18) | | |
| 3-A4 | CDR- | GFNIKDDY (SEQ ID NO: | DDYMY (SEQ ID NO: 7) | GFNIKDD (SEQ ID NO: |
| N54T* | H1 | 1) | | 12) |
| | CDR- | IDPETGDT (SEQ ID NO: | WIDPETGDTEYASKFQD | ETG (SEQ ID NO: 21) |
| | H2 | 19) | (SEQ ID NO: 20) | |
| | CDR- | TL WLRRGLDY (SEQ ID | WLRRGLDY (SEQ ID NO: | LRRGLD (SEQ ID NO: 14) |
| | H3 | NO: 3) | a | |
| | CDR- | KSLLHSNGYTY (SEQ ID | RSSKSLLHSNGYTYLF | SKSLLHSNGYTY (SEQ ID |
| | L1 | NO: 4) | (SEQ ID NO: 10) | NO: 15) |
| | CDR- | RMS (SEQ ID NO: 5) | RMSNLAS (SEQ ID NO: | RMS (SEQ ID NO: 5) |
| | L2 | | 11) | |
| | CDR- | MQHLEYPFT (SEQ ID | MQHLEYPFT (SEQ ID | HLEYPF (SEQ ID NO: 16) |
| | L3 | NO: 6) | NO: 6) | |
| | VH | EVQLQQSGAELVRPGASVKLSCTASGFNIKDDYMYWVKQRPEQGLEWIGWIDPET | | |
| | | GDTEYASKFQDKATVTADTSSNTAYLQLSSLTSEDTAVYYCTLWLRRGLDYWGQG | | |
| | | TSVTVSS (SEQ ID NO: 22) | | |
| | VL | DIVMTQAAPSVPVTPGESVSISCRSSKSLLHSNGYTYLFWFLQRPGQSPQLLIYRMSN | | |
| | | LASGVPDRFSGSGSGTAFTLRISR VEAEDVGVYYCMQHLEYPFTFGGGTKLEIK | | |
| | | (SEQ ID NO: 18) | | |
| 3-A4 | CDR- | GFNIKDDY (SEQ ID NO: | DDYMY (SEQ ID NO: 7) | GFNIKDD (SEQ ID NO: |
| N54S* | H1 | 1) | | 12) |
| | CDR- | IDPESGDT (SEQ ID NO: | WIDPESGDTEYASKFQD | ESG (SEQ ID NO: 25) |
| | H2 | 23) | (SEQ ID NO: 24) | |
| | CDR- | TLWLRRGLDY (SEQ ID | WLRRGLDY (SEQ ID NO: | LRRGLD (SEQ ID NO: 14) |
| | H3 | NO: 3) | 9) | |
| | CDR- | KSLLHSNGYTY (SEQ ID | RSSKSLLHSNGYTYLF | SKSLLHSNGYTY (SEQ ID |
| | L1 | NO: 4) | (SEQ ID NO: 10) | NO: 15) |
| | CDR- | RMS (SEQ ID NO: 5) | RMSNLAS (SEQ ID NO: | RMS (SEQ ID NO: 5) |
| | L2 | | 11) | |
| | CDR- | MQHLEYPFT (SEQ ID | MQHLEYPFT (SEQ ID | HLEYPF (SEQ ID NO: 16) |
| | L3 | NO: 6) | NO: 6) | |
| | VH | EVQLQQSGAELVRPGASVKLSCTASGFNIKDDYMYWVKQRPEQGLEWIGWIDPES | | |
| | | GDTEYASKFQDKATVTADTSSNTAYLQLSSLTSEDTAVYYCTL WLRRGLDYWGQG | | |
| | | TSVTVSS (SEQ ID NO: 26) | | |
| | VL | DIVMTQAAPSVPVTPGESVSISCRSSKSLLHSNGYTYLFWFLQRPGQSPQLLIYRMSN | | |
| | | LASGVPDRFSGSGSGTAFTLRISR VEAEDVGVYYCMQHLEYPFTFGGGTKLEIK | | |
| | | (SEQ ID NO: 18) | | |
| 3-M12 | CDR- | GYSITSGYY (SEQ ID NO: | SGYYWN (SEQ ID NO: | GYSITSGY (SEQ ID NO: |
| | H1 | 27) | 33) | 38) |
| | CDR- | ITFDGAN (SEQ ID NO: | YITFDGANNYNPSLKN | FDG (SEQ ID NO: 39) |
| | H2 | 28) | (SEQ ID NO: 34) | |
| | CDR- | TRSSYDYDVLDY (SEQ | SSYDYDVLDY (SEQ ID | SYDYDVLD (SEQ ID NO: |
| | H3 | ID NO: 29) | NO: 35) | 40) |
| | CDR- | QDISNF (SEQ ID NO: 30) | RASQDISNFLN (SEQ ID | SQDISNF (SEQ ID NO: 41) |
| | L1 | | NO: 36) | |
| | CDR- | YTS (SEQ ID NO: 31) | YTSRLHS (SEQ ID NO: | YTS (SEQ ID NO: 31) |
| | L2 | | 37) | |
| | CDR- | QQGHTLPYT (SEQ ID | QQGHTLPYT (SEQ ID | GHTLPY (SEQ ID NO: 42) |
| | L3 | NO: 32) | NO: 32) | |
| | VH | DVQLQESGPGLVKPSQSLSLTCSVTGYSITSGYYWNWIRQFPGNKLEWMGYITFDG | | |
| | | ANNYNPSLKNRISITRDTSKNQFFLKLTSVTTEDTATYYCTRSSYDYDVLDYWGQG | | |
| | | TTLTVSS (SEQ ID NO: 43) | | |
| | VL | DIQMTQTTSSLSASLGDRVTISCRASQDISNFLNWYQQRPDGTVKLLIYYTSRLHSG | | |
| | | VPSRFSGSGSGTDFSLTVSNLEQEDIATYFCQQGHTLPYTFGGGTKLEIK (SEQ ID | | |
| | | NO: 44) | | |
| 5-H12 | CDR- | GYSFTDYC (SEQ ID NO: | DYCIN (SEQ ID NO: 51) | GYSFTDY (SEQ ID NO: |
| | H1 | 45) | | 56) |
| | CDR- | IYPGSGNT (SEQ ID NO: | WIYPGSGNTRYSERFKG | GSG (SEQ ID NO: 57) |
| | H2 | 46) | (SEQ ID NO: 52) | |
| | CDR- | AREDYYPYHGMDY | EDYYPYHGMDY (SEQ ID | DYYPYHGMD (SEQ ID |
| | H3 | (SEQ ID NO: 47) | NO: 53) | NO: 58) |
| | CDR- | ESVDGYDNSF (SEQ ID | RASESVDGYDNSFMH | SESVDGYDNSF (SEQ ID |
| | L1 | NO: 48) | (SEQ ID NO: 54) | NO: 59) |
| | CDR- | RAS (SEQ ID NO: 49) | RASNLES (SEQ ID NO: | RAS (SEQ ID NO: 49) |
| | L2 | | 55) | |
| | CDR- | QQSSEDPWT (SEQ ID | QQSSEDPWT (SEQ ID | SSEDPW (SEQ ID NO: 60) |
| | L3 | NO: 50) | NO: 50) | |
| | VH | QIQLQQSGPEL VRPGASVKISCKASGYSFTDYCINWVNQRPGQGLEWIGWIYPGSGN | | |
| | | TRYSERFKGKATLTVDTSSNTAYMQLSSLTSEDSAVYFCAREDYYPYHGMDYWGQ | | |
| | | GTSVTVSS (SEQ ID NO: 61) | | |
| | VL | DIVLTQSPTSLAVSLGQRATISCRASESVDGYDNSFMHWYQQKPGQPPKLLIFRASN | | |
| | | LESGIPARFSGSGSRTDFTLTINPVEAADVATYYCQQSSEDPWTFGGGTKLEIK (SEQ | | |
| | | ID NO: 62) | | |
| 5-H12 | CDR- | GYSFTDYY (SEQ ID NO: | DYYIN (SEQ ID NO: 64) | GYSFTDY (SEQ ID NO: |
| C33Y* | H1 | 63) | | 56) |
| | CDR- | IYPGSGNT (SEQ ID NO: | WIYPGSGNTRYSERFKG | GSG (SEQ ID NO: 57) |
| | H2 | 46) | (SEQ ID NO: 52) | |
| | CDR- | AREDYYPYHGMDY | EDYYPYHGMDY (SEQ ID | DYYPYHGMD (SEQ ID |
| | H3 | (SEQ ID NO: 47) | NO: 53) | NO: 58) |
| | CDR- | ESVDGYDNSF (SEQ ID | RASESVDGYDNSFMH | SESVDGYDNSF (SEQ ID |
| | L1 | NO: 48) | (SEQ ID NO: 54) | NO: 59) |
| | CDR- | RAS (SEQ ID NO: 49) | RASNLES (SEQ ID NO: | RAS (SEQ ID NO: 49) |
| | L2 | | 55) | |
| | CDR- | QQSSEDPWT (SEQ ID | QQSSEDPWT (SEQ ID | SSEDPW (SEQ ID NO: 60) |
| | L3 | NO: 50) | NO: 50) | |
| | VH | QIQLQQSGPEL VRPGASVKISCKASGYSFTDYYINWVNQRPGQGLEWIGWIYPGSG | | |
| | | NTRYSERFKGKATLTVDTSSNTAYMQLSSLTSEDSA VYFCAREDYYPYHGMDYWG | | |
| | | QGTSVTVSS (SEQ ID NO: 65) | | |
| | VL | DIVLTQSPTSLAVSLGQRATISCRASESVDGYDNSFMHWYQQKPGQPPKLLIFRASN | | |
| | | LESGIPARFSGSGSRTDFTLTINPVEAADVATYYCQQSSEDPWTFGGGTKLEIK (SEQ | | |
| | | ID NO: 62) | | |
| 5-H12 | CDR- | GYSFTDYD (SEQ ID NO: | DYDIN (SEQ ID NO: 67) | GYSFTDY (SEQ ID NO: |
| C33D* | H1 | 66) | | 56) |
| | CDR- | IYPGSGNT (SEQ ID NO: | WIYPGSGNTRYSERFKG | GSG (SEQ ID NO: 57) |
| | H2 | 46) | (SEQ ID NO: 52) | |
| | CDR- | AREDYYPYHGMDY | EDYYPYHGMDY (SEQ ID | DYYPYHGMD (SEQ ID |
| | H3 | (SEQ ID NO: 47) | NO: 53) | NO: 58) |
| | CDR- | ESVDGYDNSF (SEQ ID | RASESVDGYDNSFMH | SESVDGYDNSF (SEQ ID |
| | L1 | NO: 48) | (SEQ ID NO: 54) | NO: 59) |
| | CDR- | RAS (SEQ ID NO: 49) | RASNLES (SEQ ID NO: | RAS (SEQ ID NO: 49) |
| | L2 | | 55) | |
| | CDR- | QQSSEDPWT (SEQ ID | QQSSEDPWT (SEQ ID | SSEDPW (SEQ ID NO: 60) |
| | L3 | NO: 50) | NO: 50) | |
| | VH | QIQLQQSGPEL VRPGASVKISCKASGYSFTDYDINWVNQRPGQGLEWIGWIYPGSGNT | | |
| | | RY | | |
| | | SERFKGKATLTVDTSSNTAYMQLSSLTSEDSAVYFCAREDYYPYHGMDYWGQGTSV | | |
| | | TVSS (SEQ ID NO: 68) | | |
| | VL | DIVLTQSPTSLAVSLGQRATISCRASESVDGYDNSFMHWYQQKPGQPPKLLIFRASN | | |
| | | LESGIPARFSGSGSRTDFTLTINPVEAADVATYYCQQSSEDPWTFGGGTKLEIK (SEQ | | |
| | | ID NO: 62) | | |
| Anti- | CDR- | GYSFTSYW (SEQ ID NO: | SYWIG (SEQ ID NO: 144) | GYSFTSY (SEQ ID NO: |
| TfR | H1 | 138) | | 149) |
| clone 8 | | | | |
| | CDR- | IYPGDSDT (SEQ ID NO: | IIYPGDSDTRYSPSFQGQ | GDS (SEQ ID NO: 150) |
| | H2 | 139) | (SEQ ID NO: 145) | |
| | CDR- | ARFPYDSSGYYSFDY | FPYDSSGYYSFDY (SEQ | PYDSSGYYSFD (SEQ ID |
| | H3 | (SEQ ID NO: 140) | ID NO: 146) | NO: 151) |
| | CDR- | QSISSY (SEQ ID NO: 141) | RASQSISSYLN (SEQ ID | SQSISSY (SEQ ID NO: |
| | L1 | | NO: 147) | 152) |
| | CDR- | AAS (SEQ ID NO: 142) | AASSLOS (SEQ ID NO: | AAS (SEQ ID NO: 142) |
| | L2 | | 148) | |
| | CDR- | QQSYSTPLT (SEQ ID NO: | QQSYSTPLT (SEQ ID NO: | SYSTPL (SEQ ID NO: 153) |
| | L3 | 143) | 143) | |

*mutation positions are according to Kabat numbering of the respective VH sequences containing the mutations

[0109] In some embodiments, the anti-TfR antibody of the present disclosure is a variant of any one of the anti-TfR antibodies provided in Table 2. In some embodiments, the anti-TfR antibody of the present disclosure comprises a CDR-H1, a CDR-H2, a CDR-H3, a CDR-L1, a CDR-L2, and a CDR-L3 that are the same as the CDR-H1, CDR-H2, and CDR-H3 in any one of the anti-TfR antibodies provided in Table 2, and comprises a heavy chain variable region and/or (e.g., and) a light chain variable region.”

[0110] Examples of amino acid sequences of the anti-TfR antibodies described herein are provided in Table 3.

TABLE 3
Variable Regions of Anti-TfR Antibodies

| Antibody | Variable Region Amino Acid Sequence** |
|---|---|
| 3A4 | V_{H}: |
| VH3 (N54T*)/Vκ4 | EVQLVQSGSELKKPGASVKVSCTASGFNIKDDYMYWVRQPPGKGLEWIGWIDPE |
| | TGDTEYASKFQDRVTVTADTSTNTAYMELSSLRSEDTAVYYCTLWLRRGLDY |
| | WGQGTLVTVSS (SEQ ID NO: 69) |
| | V_{L}: |
| | DIVMTQSPLSLPVTPGEPASISCRSSKSLLHSNGYTYLFWFQQRPGQSPRLLIYRM |
| | SNLASGVPDRFSGSGSGTDFTLKISRVEAEDVGVYYCMQHLEYPFTFGGGTKVEI |
| | K (SEQ ID NO: 70) |
| 3A4 | V_{H}: |
| VH3 (N54S*)/Vκ4 | EVQLVQSGSELKKPGASVKVSCTASGFNIKDDYMYWVRQPPGKGLEWIGWIDPE |
| | SGDTEYASKFQDRVTVTADTSTNTAYMELSSLRSEDTAVYYCTLWLRRGLDY |
| | WGQGTLVTVSS (SEQ ID NO: 71) |
| | V_{L}: |
| | DIVMTQSPLSLPVTPGEPASISCRSSKSLLHSNGYTYLFWFQQRPGQSPRLLIYRM |
| | SNLASGVPDRFSGSGSGTDFTLKISRVEAEDVGVYYCMQHLEYPFTFGGGTKVEI |
| | K (SEQ ID NO: 70) |
| 3A4 | VH: |
| VH3 /Vκ4 | EVQLVQSGSELKKPGASVKVSCTASGFNIKDDYMYWVRQPPGKGLEWIGWIDPE |
| | NGDTEYASKFQDRVTVTADTSTNTAYMELSSLRSEDTAVYYCTLWLRRGLDY |
| | WGQGTLVTVSS (SEQ ID NO: 72) |
| | VL: |
| | DIVMTQSPLSLPVTPGEPASISCRSSKSLLHSNGYTYLFWFQQRPGQSPRLLIYRM |
| | SNLASGVPDRFSGSGSGTDFTLKISRVEAEDVGVYYCMQHLEYPFTFGGGTKVEI |
| | K (SEQ ID NO: 70) |
| 3M12 | VH: |
| VH3/Vκ2 | QVQLQESGPGLVKPSQTLSLTCSVTGYSITSGYYWNWIRQPPGKGLEWMGYITF |
| | DGANNYNPSLKNRVSISRDTSKNQFSLKLSSVTAEDTATYYCTRSSYDYDVLDY |
| | WGQGTTVTVSS (SEQ ID NO: 73) |
| | VL: |
| | DIQMTQSPSSLSASVGDRVTITCRASQDISNFLNWYQQKPGQPVKLLIYYTSRLH |
| | SGVPSRFSGSGSGTDFTLTISSLQPEDFATYFCQQGHTLPYTFGQGTKLEIK (SEQ |
| | ID NO: 74) |
| 3M12 | VH: |
| VH3/Vκ3 | QVQLQESGPGLVKPSQTLSLTCSVTGYSITSGYYWNWIRQPPGKGLEWMGYITF |
| | DGANNYNPSLKNRVSISRDTSKNQFSLKLSSVTAEDTATYYCTRSSYDYDVLDY |
| | WGQGTTVTVSS (SEQ ID NO: 73) |
| | VL: |
| | DIQMTQSPSSLSASVGDRVTITCRASQDISNFLNWYQQKPGQPVKLLIYYTSRLH |
| | SGVPSRFSGSGSGTDFTLTISSLQPEDFATYYCQQGHTLPYTFGQGTKLEIK (SEQ |
| | ID NO: 75) |
| 3M12 | VH: |
| VH4/Vκ2 | QVQLQESGPGLVKPSQTLSLTCTVTGYSITSGYYWNWIRQPPGKGLEWIGYITFD |
| | GANNYNPSLKNRVSISRDTSKNQFSLKLSSVTAEDTATYYCTRSSYDYDVLDYW |
| | GQGTTVTVSS (SEQ ID NO: 76) |
| VL: | |
| | DIQMTQSPSSLSASVGDRVTITCRASQDISNFLNWYQQKPGQPVKLLIYYTSRLH |
| | SGVPSRFSGSGSGTDFTLTISSLQPEDFATYFCQQGHTLPYTFGQGTKLEIK (SEQ |
| | ID NO: 74) |
| 3M12 | VH: |
| VH4/Vκ3 | QVQLQESGPGLVKPSQTLSLTCTVTGYSITSGYYWNWIRQPPGKGLEWIGYITFD |
| | GANNYNPSLKNRVSISRDTSKNQFSLKLSSVTAEDTATYYCTRSSYDYDVLDYW |
| | GQGTTVTVSS (SEQ ID NO: 76) |
| | VL: |
| | DIQMTQSPSSLSASVGDRVTITCRASQDISNFLNWYQQKPGQPVKLLIYYTSRLH |
| | SGVPSRFSGSGSGTDFTLTISSLQPEDFATYYCQQGHTLPYTFGQGTKLEIK (SEQ |
| | ID NO: 75) |
| 5H12 | VH: |
| VH5 (C33Y*)/Vκ3 | QVQLVQSGAEVKKPGASVKVSCKASGYSFTDYYINWVRQAPGQGLEWMGWIY |
| | PGSGNTRYSERFKGRVTITRDTSASTAYMELSSLRSEDTAVYYCAREDYYPYHG |
| | MDYWGQGTLVTVSS (SEQ ID NO: 77) |
| | VL: |
| | DIVLTQSPDSLAVSLGERATINCRASESVDGYDNSFMHWYQQKPGQPPKLLIFRA |
| | SNLESGVPDRFSGSGSRTDFTLTISSLQAEDVAVYYCQQSSEDPWTFGQGTKLEI |
| | K (SEQ ID NO: 78) |
| 5H12 | VH: |
| VH5 (C33D*)/Vκ4 | QVQLVQSGAEVKKPGASVKVSCKASGYSFTDYDINWVRQAPGQGLEWMGWIY |
| | PGSGNTRYSERFKGRVTITRDTSASTAYMELSSLRSEDTAVYYCAREDYYPYHG |
| | MDYWGQGTL VTVSS (SEQ ID NO: 79) |
| | VL: |
| | DIVMTQSPDSLAVSLGERATINCRASESVDGYDNSFMHWYQQKPGQPPKLLIFR |
| | ASNLESGVPDRFSGSGSGTDFTLTISSLQAEDVAVYYCQQSSEDPWTFGQGTKLE |
| | IK (SEQ ID NO: 80) |
| 5H12 | VH: |
| VH5 (C33Y*)/Vκ4 | QVQLVQSGAEVKKPGASVKVSCKASGYSFTDYYINWVRQAPGQGLEWMGWIY |
| | PGSGNTRYSERFKGRVTITRDTSASTAYMELSSLRSEDTAVYYCAREDYYPYHG |
| | MDYWGQGTLVTVSS (SEQ ID NO: 77) |
| | VL: |
| | DIVMTQSPDSLAVSLGERATINCRASESVDGYDNSFMHWYQQKPGQPPKLLIFR |
| | ASNLESGVPDRFSGSGSGTDFTLTISSLQAEDVAVYYCQQSSEDPWTFGQGTKLE |
| | IK (SEQ ID NO: 80) |
| Anti-TfR clone 8 | VH: |
| | QVQLVQSGAEVKKPGESLKISCKGSGYSFTSYWIGWVRQMPGKGLEWMGIIYPG |
| | DSDTRYSPSFQGQVTISADKSISTAYLQWSSLKASDTAMYYCARFPYDSSGYYSF |
| | DYWGQGTLVTVSS (SEQ ID NO: 154) |
| | VL: |
| | DIQMTQSPSSLSASVGDRVTITCRASQSISSYLNWYQQKPGKAPKLLIYAASSLQS |
| | GVPSRFSGSGSGTDFTLTISSLQPEDFATYYCQQSYSTPLTFGGGTKVEIK (SEQ ID |
| | NO: 155) |

*mutation positions are according to Kabat numbering of the respective VH sequences containing the mutations
**CDRs according to the Kabat numbering system are bolded

[0111] In some embodiments, the anti-TfR antibody of the present disclosure comprises a VH comprising the CDR-H1, CDR-H2, and CDR-H3 of any one of the anti-TfR antibodies provided in Table 3 and comprises one or more (e.g., 1, 2, 3, 4, 5, 6, 7, 8, 9, 10 or more) amino acid variations in the framework regions as compared with the respective VH provided in Table 3. Alternatively or in addition (e.g., in addition), the anti-TfR antibody of the present disclosure comprises a VL comprising the CDR-L1, CDR-L2, and CDR-L3 of any one of the anti-TfR antibodies provided in Table 3 and comprises one or more (e.g., 1, 2, 3, 4, 5, 6, 7, 8, 9, 10 or more) amino acid variations in the framework regions as compared with the respective VL provided in Table 3.

[0112] In some embodiments, the anti-TfR antibody of the present disclosure comprises a VH comprising the CDR-H1, CDR-H2, and CDR-H3 of any one of the anti-TfR antibodies provided in Table 3 and comprising an amino acid sequence that is at least 70% (e.g., at least 70%, at least 75%, at least 80%, at least 85%, at least 90%, at least 95%, at least 99%) identical in the framework regions as compared with the respective VH provided in Table 3. Alternatively or in addition (e.g., in addition), the anti-TfR antibody of the present disclosure comprises a VL comprising the CDR-L1, CDR-L2, and CDR-L3 of any one of the anti-TfR antibodies provided in Table 3 and comprising an amino acid sequence that is at least 70% (e.g., at least 70%, at least 75%, at least 80%, at least 85%, at least 90%, at least 95%, at least 99%) identical compared with the respective VL provided in Table 3.

[0113] In some embodiments, the anti-TfR antibody of the present disclosure comprises a VH comprising the amino acid sequence of SEQ ID NO: 69 and a VL comprising the amino acid sequence of SEQ ID NO: 70.

[0114] In some embodiments, the anti-TfR antibody of the present disclosure comprises a VH comprising the amino acid sequence of SEQ ID NO: 71 and a VL comprising the amino acid sequence of SEQ ID NO: 70.

[0115] In some embodiments, the anti-TfR antibody of the present disclosure comprises a VH comprising the amino acid sequence of SEQ ID NO: 72 and a VL comprising the amino acid sequence of SEQ ID NO: 70.

[0116] In some embodiments, the anti-TfR antibody of the present disclosure comprises a VH comprising the amino acid sequence of SEQ ID NO: 73 and a VL comprising the amino acid sequence of SEQ ID NO: 74.

[0117] In some embodiments, the anti-TfR antibody of the present disclosure comprises a VH comprising the amino acid sequence of SEQ ID NO: 73 and a VL comprising the amino acid sequence of SEQ ID NO: 75.

[0118] In some embodiments, the anti-TfR antibody of the present disclosure comprises a VH comprising the amino acid sequence of SEQ ID NO: 76 and a VL comprising the amino acid sequence of SEQ ID NO: 74.

[0119] In some embodiments, the anti-TfR antibody of the present disclosure comprises a VH comprising the amino acid sequence of SEQ ID NO: 76 and a VL comprising the amino acid sequence of SEQ ID NO: 75.

[0120] In some embodiments, the anti-TfR antibody of the present disclosure comprises a VH comprising the amino acid sequence of SEQ ID NO: 77 and a VL comprising the amino acid sequence of SEQ ID NO: 78.

[0121] In some embodiments, the anti-TfR antibody of the present disclosure comprises a VH comprising the amino acid sequence of SEQ ID NO: 79 and a VL comprising the amino acid sequence of SEQ ID NO: 80.

[0122] In some embodiments, the anti-TfR antibody of the present disclosure comprises a VH comprising the amino acid sequence of SEQ ID NO: 77 and a VL comprising the amino acid sequence of SEQ ID NO: 80.

[0123] In some embodiments, the anti-TfR antibody of the present disclosure comprises a VH comprising the amino acid sequence of SEQ ID NO: 154 and a VL comprising the amino acid sequence of SEQ ID NO: 155.

[0124] In some embodiments, the anti-TfR antibody described herein is a full-length IgG, which can include a heavy constant region and a light constant region from a human antibody. In some embodiments, the heavy chain of any of the anti-TfR antibodies as described herein may comprises a heavy chain constant region (CH) or a portion thereof (e.g., CH1, CH2, CH3, or a combination thereof). The heavy chain constant region can of any suitable origin, e.g., human, mouse, rat, or rabbit. In one specific example, the heavy chain constant region is from a human IgG (a gamma heavy chain), e.g., IgG1, IgG2, or IgG4. An example of a human IgG1 constant region is given below:

(SEQ ID NO: 81)
[sequence omitted]

[0125] In some embodiments, the heavy chain of any of the anti-TfR antibodies described herein comprises a mutant human IgG1 constant region. For example, the introduction of LALA mutations (a mutant derived from mAb b12 that has been mutated to replace the lower hinge residues Leu234 Leu235 with Ala234 and Ala235) in the CH2 domain of human IgG1 is known to reduce Fcγ receptor binding (Bruhns, P., et al. (2009) and Xu, D. et al. (2000)). The mutant human IgG1 constant region is provided below (mutations bonded and underlined):

(SEQ ID NO: 82)
ASTKGPSVFPLAPSSKSTSGGTAALGCLVKDYFPEPVTVS
WNSGALTSGVHTFPAVLQSSGLYSLSSVVTVPSSSLGTQT
YICNVNHKPSNTKVDKKVEPKSCDKTHTCPPCPAPEAAGG
PSVFLFPPKPKDTLMISRTPEVTCVVVDVSHEDPEVKFNW
YVDGVEVHNAKTKPREEQYNSTYRVVSVLTVLHQDWLNGK
EYKCKVSNKALPAPIEKTISKAKGQPREPQVYTLPPSRDE
LTKNQVSLTCLVKGFYPSDIAVEWESNGQPENNYKTTPPV
LDSDGSFFLYSKLTVDKSRWQQGNVFSCSVMHEALHNHYT
QKSLSLSPGK

[0126] In some embodiments, the light chain of any of the anti-TfR antibodies described herein may further comprise a light chain constant region (CL), which can be any CL known in the art. In some examples, the CL is a kappa light chain. In other examples, the CL is a lambda light chain. In some embodiments, the CL is a kappa light chain, the sequence of which is provided below:

(SEQ ID NO: 83)
[sequence omitted]

[0127] Other antibody heavy and light chain constant regions are well known in the art, e.g., those provided in the IMGT database (www.imgt.org) or at www.vase2.org/vbstat.php., both of which are incorporated by reference herein.

[0128] In some embodiments, the anti-TfR antibody described herein comprises a heavy chain comprising any one of the VH as listed in Table 3 or any variants thereof and a heavy chain constant region that is at least 80%, at least 85%, at least 90%, at least 95%, or at least 99% identical to SEQ ID NO: 81 or SEQ ID NO: 82. In some embodiments, the anti-TfR antibody described herein comprises a heavy chain comprising any one of the VH as listed in Table 3 or any variants thereof and a heavy chain constant region that contains no more than 25 amino acid variations (e.g., no more than 25, 24, 23, 22, 21, 20, 19, 18, 17, 16, 15, 14, 13, 12, 11, 10, 9, 8, 7, 6, 5, 4, 3, 2, or 1 amino acid variation) as compared with SEQ ID NO: 81 or SEQ ID NO: 82. In some embodiments, the anti-TfR antibody described herein comprises a heavy chain comprising any one of the VH as listed in Table 3 or any variants thereof and a heavy chain constant region as set forth in SEQ ID NO: 81. In some embodiments, the anti-TfR antibody described herein comprises heavy chain comprising any one of the VH as listed in Table 3 or any variants thereof and a heavy chain constant region as set forth in SEQ ID NO: 82.

[0129] In some embodiments, the anti-TfR antibody described herein comprises a light chain comprising any one of the VL as listed in Table 3 or any variants thereof and a light chain constant region that is at least 80%, at least 85%, at least 90%, at least 95%, or at least 99% identical to SEQ ID NO: 83. In some embodiments, the anti-TfR antibody described herein comprises a light chain comprising any one of the VL as listed in Table 3 or any variants thereof and a light chain constant region contains no more than 25 amino acid variations (e.g., no more than 25, 24, 23, 22, 21, 20, 19, 18, 17, 16, 15, 14, 13, 12, 11, 10, 9, 8, 7, 6, 5, 4, 3, 2, or 1 amino acid variation) as compared with SEQ ID NO: 83. In some embodiments, the anti-TfR antibody described herein comprises a light chain comprising any one of the VL as listed in Table 3 or any variants thereof and a light chain constant region set forth in SEQ ID NO: 83.

[0130] Examples of IgG heavy chain and light chain amino acid sequences of the anti-TfR antibodies described are provided in Table 4 below.

TABLE 4
Heavy chain and light chain sequences of examples of anti-TfR IgGs

| Antibody | IgG Heavy Chain/Light Chain Sequences** |
|---|---|
| 3A4 | Heavy Chain (with wild type human IgG1 constant region): |
| VH3 (N54T*)/Vκ4 | EVQLVQSGSELKKPGASVKVSCTASGFNIKDDYMYWVRQPPGKGLEWIGWIDPET |
| | GDTEYASKFQDRVTVTADTSTNTAYMELSSLRSEDTAVYYCTLWLRRGLDYWG |
| | QGTLVTVSSASTKGPSVFPLAPSSKSTSGGTAALGCLVKDYFPEPVTVSWNSGALTS |
| | GVHTFPAVLQSSGLYSLSSVVTVPSSSLGTQTYICNVNHKPSNTKVDKKVEPKSCDK |
| | THTCPPCPAPELLGGPSVFLFPPKPKDTLMISRTPEVTCVVVDVSHEDPEVKFNWYV |
| | DGVEVHNAKTKPREEQYNSTYRVVSVLTVLHQDWLNGKEYKCKVSNKALPAPIEK |
| | TISKAKGQPREPQVYTLPPSRDELTKNQVSLTCLVKGFYPSDIAVEWESNGQPENNY |
| | KTTPPVLDSDGSFFLYSKLTVDKSRWQQGNVFSCSVMHEALHNHYTQKSLSLSPGK |
| | (SEQ ID NO: 84) |
| | Light Chain (with kappa light chain constant region): |
| | DIVMTQSPLSLPVTPGEPASISCRSSKSLLHSNGYTYLFWFQQRPGQSPRLLIYRMS |
| | NLASGVPDRFSGSGSGTDFTLKISRVEAEDVGVYYCMQHLEYPFTFGGGTKVEIKR |
| | TVAAPSVFIFPPSDEQLKSGTASVVCLLNNFYPREAKVQWKVDNALQSGNSQESVT |
| | EQDSKDSTYSLSSTLTLSKADYEKHKVYACEVTHQGLSSPVTKSFNRGEC (SEQ ID |
| | NO: 85) |
| 3A4 | Heavy Chain (with wild type human IgG1 constant region): |
| VH3 (N54S*)/Vκ4 | EVQLVQSGSELKKPGASVKVSCTASGFNIKDDYMYWVRQPPGKGLEWIGWIDPES |
| | GDTEYASKFQDRVTVTADTSTNTAYMELSSLRSEDTAVYYCTLWLRRGLDYWG |
| | QGTLVTVSSASTKGPSVFPLAPSSKSTSGGTAALGCLVKDYFPEPVTVSWNSGALTS |
| | GVHTFPAVLQSSGLYSLSSVVTVPSSSLGTQTYICNVNHKPSNTKVDKKVEPKSCDK |
| | THTCPPCPAPELLGGPSVFLFPPKPKDTLMISRTPEVTCVVVDVSHEDPEVKFNWYV |
| | DGVEVHNAKTKPREEQYNSTYRVVSVLTVLHQDWLNGKEYKCKVSNKALPAPIEK |
| | TISKAKGQPREPQVYTLPPSRDELTKNQVSLTCLVKGFYPSDIAVEWESNGQPENNY |
| | KTTPPVLDSDGSFFLYSKLTVDKSRWQQGNVFSCSVMHEALHNHYTQKSLSLSPGK |
| | (SEQ ID NO: 86) |
| | Light Chain (with kappa light chain constant region): |
| | DIVMTQSPLSLPVTPGEPASISCRSSKSLLHSNGYTYLFWFQQRPGQSPRLLIYRMS |
| | NLASGVPDRFSGSGSGTDFTLKISRVEAEDVGVYYCMQHLEYPFTFGGGTKVEIKR |
| | TVAAPSVFIFPPSDEQLKSGTASVVCLLNNFYPREAKVQWKVDNALQSGNSQESVT |
| | EQDSKDSTYSLSSTLTLSKADYEKHKVYACEVTHQGLSSPVTKSFNRGEC (SEQ ID |
| | NO: 85) |
| 3A4 | Heavy Chain (with wild type human IgG1 constant region): |
| VH3/Vκ4 | EVQLVQSGSELKKPGASVKVSCTASGFNIKDDYMYWVRQPPGKGLEWIGWIDPEN |
| | GDTEYASKFQDRVTVTADTSTNTAYMELSSLRSEDTAVYYCTLWLRRGLDYWG |
| | QGTLVTVSSASTKGPSVFPLAPSSKSTSGGTAALGCLVKDYFPEPVTVSWNSGALTS |
| | GVHTFPAVLQSSGLYSLSSVVTVPSSSLGTQTYICNVNHKPSNTKVDKKVEPKSCDK |
| | THTCPPCPAPELLGGPSVFLFPPKPKDTLMISRTPEVTCVVVDVSHEDPEVKFNWYV |
| | DGVEVHNAKTKPREEQYNSTYRVVSVLTVLHQDWLNGKEYKCKVSNKALPAPIEK |
| | TISKAKGQPREPQVYTLPPSRDELTKNQVSLTCLVKGFYPSDIAVEWESNGQPENNY |
| | KTTPPVLDSDGSFFLYSKLTVDKSRWQQGNVFSCSVMHEALHNHYTQKSLSLSPGK |
| | (SEQ ID NO: 87) |
| | Light Chain (with kappa light chain constant region): |
| | DIVMTQSPLSLPVTPGEPASISCRSSKSLLHSNGYTYLFWFQQRPGQSPRLLIYRMS |
| | NLASGVPDRFSGSGSGTDFTLKISRVEAEDVGVYYCMQHLEYPFTFGGGTKVEIKR |
| | TVAAPSVFIFPPSDEQLKSGTASVVCLLNNFYPREAKVQWKVDNALQSGNSQESVT |
| | EQDSKDSTYSLSSTLTLSKADYEKHKVYACEVTHQGLSSPVTKSFNRGEC (SEQ ID |
| | NO: 85) |
| 3M12 | Heavy Chain (with wild type human IgG1 constant region): |
| VH3/Vκ2 | QVQLQESGPGLVKPSQTLSLTCSVTGYSITSGYYWNWIRQPPGKGLEWMGYITFD |
| | GANNYNPSLKNRVSISRDTSKNQFSLKLSSVTAEDTATYYCTRSSYDYDVLDYWG |
| | QGTTVTVSSASTKGPSVFPLAPSSKSTSGGTAALGCLVKDYFPEPVTVSWNSGALTS |
| | GVHTFPAVLQSSGLYSLSSVVTVPSSSLGTQTYICNVNHKPSNTKVDKKVEPKSCDK |
| | THTCPPCPAPELLGGPSVFLFPPKPKDTLMISRTPEVTCVVVDVSHEDPEVKFNWYV |
| | DGVEVHNAKTKPREEQYNSTYRVVSVLTVLHQDWLNGKEYKCKVSNKALPAPIEK |
| | TISKAKGQPREPQVYTLPPSRDELTKNQVSLTCLVKGFYPSDIAVEWESNGQPENNY |
| | KTTPPVLDSDGSFFLYSKLTVDKSRWQQGNVFSCSVMHEALHNHYTQKSLSLSPGK |
| | (SEQ ID NO: 88) |
| | Light Chain (with kappa light chain constant region): |
| | DIQMTQSPSSLSASVGDRVTITCRASQDISNFLNWYQQKPGQPVKLLIYYTSRLHS |
| | GVPSRFSGSGSGTDFTLTISSLQPEDFATYFCQQGHTLPYTFGQGTKLEIKRTVAAP |
| | SVFIFPPSDEQLKSGTASVVCLLNNFYPREAKVQWKVDNALQSGNSQESVTEQDSK |
| | DSTYSLSSTLTLSKADYEKHKVYACEVTHQGLSSPVTKSFNRGEC (SEQ ID NO: 89) |
| 3M12 | Heavy Chain (with wild type human IgG1 constant region): |
| VH3/Vκ3 | QVQLQESGPGLVKPSQTLSLTCSVTGYSITSGYYWNWIRQPPGKGLEWMGYITFD |
| | GANNYNPSLKNRVSISRDTSKNQFSLKLSSVTAEDTATYYCTRSSYDYDVLDYWG |
| | QGTTVTVSSASTKGPSVFPLAPSSKSTSGGTAALGCLVKDYFPEPVTVSWNSGALTS |
| | GVHTFPAVLQSSGLYSLSSVVTVPSSSLGTQTYICNVNHKPSNTKVDKKVEPKSCDK |
| | THTCPPCPAPELLGGPSVFLFPPKPKDTLMISRTPEVTCVVVDVSHEDPEVKFNWYV |
| | DGVEVHNAKTKPREEQYNSTYRVVSVLTVLHQDWLNGKEYKCKVSNKALPAPIEK |
| | TISKAKGQPREPQVYTLPPSRDELTKNQVSLTCLVKGFYPSDIAVEWESNGQPENNY |
| | KTTPPVLDSDGSFFLYSKLTVDKSRWQQGNVFSCSVMHEALHNHYTQKSLSLSPGK |
| | (SEQ ID NO: 88) |
| | Light Chain (with kappa light chain constant region): |
| | DIQMTQSPSSLSASVGDRVTITCRASQDISNFLNWYQQKPGQPVKLLIYYTSRLHS |
| | GVPSRFSGSGSGTDFTLTISSLQPEDFATYYCQQGHTLPYTFGQGTKLEIKRTVAAP |
| | SVFIFPPSDEQLKSGTASVVCLLNNFYPREAKVQWKVDNALQSGNSQESVTEQDSK |
| | DSTYSLSSTLTLSKADYEKHKVYACEVTHQGLSSPVTKSFNRGEC (SEQ ID NO: 90) |
| 3M12 | Heavy Chain (with wild type human IgG1 constant region): |
| VH4/Vκ2 | QVQLQESGPGLVKPSQTLSLTCTVTGYSITSGYYWNWIRQPPGKGLEWIGYITFDG |
| | ANNYNPSLKNRVSISRDTSKNQFSLKLSSVTAEDTATYYCTRSSYDYDVLDYWGQ |
| | GTTVTVSSASTKGPSVFPLAPSSKSTSGGTAALGCLVKDYFPEPVTVSWNSGALTSG |
| | VHTFPAVLQSSGLYSLSSVVTVPSSSLGTQTYICNVNHKPSNTKVDKKVEPKSCDKT |
| | HTCPPCPAPELLGGPSVFLFPPKPKDTLMISRTPEVTCVVVDVSHEDPEVKFNWYVD |
| | GVEVHNAKTKPREEQYNSTYRVVSVLTVLHQDWLNGKEYKCKVSNKALPAPIEKT |
| | ISKAKGQPREPQVYTLPPSRDELTKNQVSLTCLVKGFYPSDIAVEWESNGQPENNY |
| | KTTPPVLDSDGSFFLYSKLTVDKSRWQQGNVFSCSVMHEALHNHYTQKSLSLSPGK |
| | (SEQ ID NO: 91) |
| | Light Chain (with kappa light chain constant region): |
| | DIQMTQSPSSLSASVGDRVTITCRASQDISNFLNWYQQKPGQPVKLLIYYTSRLHS |
| | GVPSRFSGSGSGTDFTLTISSLQPEDFATYFCQQGHTLPYTFGQGTKLEIKRTVAAP |
| | SVFIFPPSDEQLKSGTASVVCLLNNFYPREAKVQWKVDNALQSGNSQESVTEQDSK |
| | DSTYSLSSTLTLSKADYEKHKVYACEVTHQGLSSPVTKSFNRGEC (SEQ ID NO: 89) |
| 3M12 | Heavy Chain (with wild type human IgG1 constant region): |
| VH4/Vκ3 | QVQLQESGPGLVKPSQTLSLTCTVTGYSITSGYYWNWIRQPPGKGLEWIGYITFDG |
| | ANNYNPSLKNRVSISRDTSKNQFSLKLSSVTAEDTATYYCTRSSYDYDVLDYWGQ |
| | GTTVTVSSASTKGPSVFPLAPSSKSTSGGTAALGCLVKDYFPEPVTVSWNSGALTSG |
| | VHTFPAVLQSSGLYSLSSVVTVPSSSLGTQTYICNVNHKPSNTKVDKKVEPKSCDKT |
| | HTCPPCPAPELLGGPSVFLFPPKPKDTLMISRTPEVTCVVVDVSHEDPEVKFNWYVD |
| | GVEVHNAKTKPREEQYNSTYRVVSVLTVLHQDWLNGKEYKCKVSNKALPAPIEKT |
| | ISKAKGQPREPQVYTLPPSRDELTKNQVSLTCLVKGFYPSDIAVEWESNGQPENNY |
| | KTTPPVLDSDGSFFLYSKLTVDKSRWQQGNVFSCSVMHEALHNHYTQKSLSLSPGK |
| | (SEQ ID NO: 91) |
| | Light Chain (with kappa light chain constant region): |
| | DIQMTQSPSSLSASVGDRVTITCRASQDISNFLNWYQQKPGQPVKLLIYYTSRLHS |
| | GVPSRFSGSGSGTDFTLTISSLQPEDFATYYCQQGHTLPYTFGQGTKLEIKRTVAAP |
| | SVFIFPPSDEQLKSGTASVVCLLNNFYPREAKVQWKVDNALQSGNSQESVTEQDSK |
| | DSTYSLSSTLTLSKADYEKHKVYACEVTHQGLSSPVTKSFNRGEC (SEQ ID NO: 90) |
| 5H12 | Heavy Chain (with wild type human IgG1 constant region): |
| VH5 (C33Y*)/ | QVQLVQSGAEVKKPGASVKVSCKASGYSFTDYYINWVRQAPGQGLEWMGWIYP |
| Vκ3 | GSGNTRYSERFKGRVTITRDTSASTAYMELSSLRSEDTAVYYCAREDYYPYHGM |
| | DYWGQGTLVTVSSASTKGPSVFPLAPSSKSTSGGTAALGCLVKDYFPEPVTVSWNS |
| | GALTSGVHTFPAVLQSSGLYSLSSVVTVPSSSLGTQTYICNVNHKPSNTKVDKKVEP |
| | KSCDKTHTCPPCPAPELLGGPSVFLFPPKPKDTLMISRTPEVTCVVVDVSHEDPEVK |
| | FNWYVDGVEVHNAKTKPREEQYNSTYRVVSVLTVLHQDWLNGKEYKCKVSNKA |
| | LPAPIEKTISKAKGQPREPQVYTLPPSRDELTKNQVSLTCLVKGFYPSDIAVEWESNG |
| | QPENNYKTTPPVLDSDGSFFLYSKLTVDKSRWQQGNVFSCSVMHEALHNHYTQKS |
| | LSLSPGK (SEQ ID NO: 92) |
| | Light Chain (with kappa light chain constant region): |
| | DIVLTQSPDSLAVSLGERATINCRASESVDGYDNSFMHWYQQKPGQPPKLLIFRAS |
| | NLESGVPDRFSGSGSRTDFTLTISSLQAEDVAVYYCQQSSEDPWTFGQGTKLEIKR |
| | TVAAPSVFIFPPSDEQLKSGTASVVCLLNNFYPREAKVQWKVDNALQSGNSQESVT |
| | EQDSKDSTYSLSSTLTLSKADYEKHKVYACEVTHQGLSSPVTKSFNRGEC (SEQ ID |
| | NO: 93) |
| 5H12 | Heavy Chain (with wild type human IgG1 constant region): |
| VH5 (C33D*)/ | QVQLVQSGAEVKKPGASVKVSCKASGYSFTDYDINWVRQAPGQGLEWMGWIYP |
| Vκ4 | GSGNTRYSERFKGRVTITRDTSASTAYMELSSLRSEDTAVYYCAREDYYPYHGM |
| | DYWGQGTLVTVSSASTKGPSVFPLAPSSKSTSGGTAALGCLVKDYFPEPVTVSWNS |
| | GALTSGVHTFPAVLQSSGLYSLSSVVTVPSSSLGTQTYICNVNHKPSNTKVDKKVEP |
| | KSCDKTHTCPPCPAPELLGGPSVFLFPPKPKDTLMISRTPEVTCVVVDVSHEDPEVK |
| | FNWYVDGVEVHNAKTKPREEQYNSTYRVVSVLTVLHQDWLNGKEYKCKVSNKA |
| | LPAPIEKTISKAKGQPREPQVYTLPPSRDELTKNQVSLTCLVKGFYPSDIAVEWESNG |
| | QPENNYKTTPPVLDSDGSFFLYSKLTVDKSRWQQGNVFSCSVMHEALHNHYTQKS |
| | LSLSPGK (SEQ ID NO: 94) |
| | Light Chain (with kappa light chain constant region): |
| | DIVMTQSPDSLAVSLGERATINCRASESVDGYDNSFMHWYQQKPGQPPKLLIFRAS |
| | NLESGVPDRFSGSGSGTDFTLTISSLQAEDVAVYYCQQSSEDPWTFGQGTKLEIKR |
| | TVAAPSVFIFPPSDEQLKSGTASVVCLLNNFYPREAKVQWKVDNALQSGNSQESVT |
| | EQDSKDSTYSLSSTLTLSKADYEKHKVYACEVTHQGLSSPVTKSFNRGEC (SEQ ID |
| | NO: 95) |
| 5H12 | Heavy Chain (with wild type human IgG1 constant region): |
| VH5 (C33Y*)/ | QVQLVQSGAEVKKPGASVKVSCKASGYSFTDYYINWVRQAPGQGLEWMGWIYP |
| Vκ4 | GSGNTRYSERFKGRVTITRDTSASTAYMELSSLRSEDTAVYYCAREDYYPYHGM |
| | DYWGQGTLVTVSSASTKGPSVFPLAPSSKSTSGGTAALGCLVKDYFPEPVTVSWNS |
| | GALTSGVHTFPAVLQSSGLYSLSSVVTVPSSSLGTQTYICNVNHKPSNTKVDKKVEP |
| | KSCDKTHTCPPCPAPELLGGPSVFLFPPKPKDTLMISRTPEVTCVVVDVSHEDPEVK |
| | FNWYVDGVEVHNAKTKPREEQYNSTYRVVSVLTVLHQDWLNGKEYKCKVSNKA |
| | LPAPIEKTISKAKGQPREPQVYTLPPSRDELTKNQVSLTCLVKGFYPSDIAVEWESNG |
| | QPENNYKTTPPVLDSDGSFFLYSKLTVDKSRWQQGNVFSCSVMHEALHNHYTQKS |
| | LSLSPGK (SEQ ID NO: 92) |
| | Light Chain (with kappa light chain constant region): |
| | DIVMTQSPDSLAVSLGERATINCRASESVDGYDNSFMHWYQQKPGQPPKLLIFRAS |
| | NLESGVPDRFSGSGSGTDFTLTISSLQAEDVAVYYCQQSSEDPWTFGQGTKLEIKR |
| | TVAAPSVFIFPPSDEQLKSGTASVVCLLNNFYPREAKVQWKVDNALQSGNSQESVT |
| | EQDSKDSTYSLSSTLTLSKADYEKHKVYACEVTHQGLSSPVTKSFNRGEC (SEQ ID |
| | NO: 95) |
| Anti-TfR | Heavy chain (with wild type human IgG1 constant region): |
| clone 8 | QVQLVQSGAEVKKPGESLKISCKGSGYSFTSYWIGWVRQMPGKGLEWMGIIYPGD |
| | SDTRYSPSFQGQVTISADKSISTAYLQWSSLKASDTAMYYCARFPYDSSGYYSFDY |
| | WGQGTLVTVSSASTKGPSVFPLAPSSKSTSGGTAALGCLVKDYFPEPVTVSWNSGA |
| | LTSGVHTFPAVLQSSGLYSLSSVVTVPSSSLGTQTYICNVNHKPSNTKVDKKVEPKS |
| | CDKTHTCPPCPAPELLGGPSVFLFPPKPKDTLMISRTPEVTCVVVDVSHEDPEVKFN |
| | WYVDGVEVHNAKTKPREEQYNSTYRVVSVLTVLHQDWLNGKEYKCKVSNKALP |
| | APIEKTISKAKGQPREPQVYTLPPSRDELTKNQVSLTCLVKGFYPSDIAVEWESNGQ |
| | PENNYKTTPPVLDSDGSFFLYSKLTVDKSRWQQGNVFSCSVMHEALHNHYTQKSL |
| | SLSPGK (SEQ ID NO: 156) |
| | Light chain (with kappa light chain constant region): |
| | DIQMTQSPSSLSASVGDRVTITCRASQSISSYLNWYQQKPGKAPKLLIYAASSLQSG |
| | VPSRFSGSGSGTDFTLTISSLQPEDFATYYCQQSYSTPLTFGGGTKVEIKRTVAAPSV |
| | FIFPPSDEQLKSGTASVVCLLNNFYPREAKVQWKVDNALQSGNSQESVTEQDSKDS |
| | TYSLSSTLTLSKADYEKHKVYACEVTHQGLSSPVTKSFNRGEC (SEQ ID NO: 157) |

*mutation positions are according to Kabat numbering of the respective VH sequences containing the mutations
**CDRs according to the Kabat numbering system are bolded; VH/VL sequences underlined

[0131] In some embodiments, the anti-TfR antibody of the present disclosure comprises a heavy chain containing no more than 25 amino acid variations (e.g., no more than 25, 24, 23, 22, 21, 20, 19, 18, 17, 16, 15, 14, 13, 12, 11, 10, 9, 8, 7, 6, 5, 4, 3, 2, or 1 amino acid variation) as compared with the heavy chain as set forth in any one of SEQ ID NOs: 84, 86, 87, 88, 91, 92, 94, and 156. Alternatively or in addition (e.g., in addition), the anti-TfR antibody of the present disclosure comprises a light chain containing no more than 25 amino acid variations (e.g., no more than 25, 24, 23, 22, 21, 20, 19, 18, 17, 16, 15, 14, 13, 12, 11, 10, 9, 8, 7, 6, 5, 4, 3, 2, or 1 amino acid variation) as compared with the light chain as set forth in any one of SEQ ID NOs: 85, 89, 90, 93, 95, and 157.

[0132] In some embodiments, the anti-TfR antibody described herein comprises a heavy chain comprising an amino acid sequence that is at least 75% (e.g., 75%, 80%, 85%, 90%, 95%, 98%, or 99%) identical to any one of SEQ ID NOs: 84, 86, 87, 88, 91, 92, 94, and 156. Alternatively or in addition (e.g., in addition), the anti-TfR antibody described herein comprises a light chain comprising an amino acid sequence that is at least 75% (e.g., 75%, 80%, 85%, 90%, 95%, 98%, or 99%) identical to any one of SEQ ID NOs: 85, 89, 90, 93, 95, and 157. In some embodiments, the anti-TfR antibody described herein comprises a heavy chain comprising the amino acid sequence of any one of SEQ ID NOs: 84, 86, 87, 88, 91, 92, 94, and 156. Alternatively or in addition (e.g., in addition), the anti-TfR antibody described herein comprises a light chain comprising the amino acid sequence of any one of SEQ ID NOs: 85, 89, 90, 93, 95 and 157.

[0133] In some embodiments, the anti-TfR antibody of the present disclosure comprises a heavy chain comprising the amino acid sequence of SEQ ID NO: 84 and a light chain comprising the amino acid sequence of SEQ ID NO: 85.

[0134] In some embodiments, the anti-TfR antibody of the present disclosure comprises a heavy chain comprising the amino acid sequence of SEQ ID NO: 86 and a light chain comprising the amino acid sequence of SEQ ID NO: 85.

[0135] In some embodiments, the anti-TfR antibody of the present disclosure comprises a heavy chain comprising the amino acid sequence of SEQ ID NO: 87 and a light chain comprising the amino acid sequence of SEQ ID NO: 85.

[0136] In some embodiments, the anti-TfR antibody of the present disclosure comprises a heavy chain comprising the amino acid sequence of SEQ ID NO: 88 and a light chain comprising the amino acid sequence of SEQ ID NO: 89.

[0137] In some embodiments, the anti-TfR antibody of the present disclosure comprises a heavy chain comprising the amino acid sequence of SEQ ID NO: 88 and a light chain comprising the amino acid sequence of SEQ ID NO: 90.

[0138] In some embodiments, the anti-TfR antibody of the present disclosure comprises a heavy chain comprising the amino acid sequence of SEQ ID NO: 91 and a light chain comprising the amino acid sequence of SEQ ID NO: 89.

[0139] In some embodiments, the anti-TfR antibody of the present disclosure comprises a heavy chain comprising the amino acid sequence of SEQ ID NO: 91 and a light chain comprising the amino acid sequence of SEQ ID NO: 90.

[0140] In some embodiments, the anti-TfR antibody of the present disclosure comprises a heavy chain comprising the amino acid sequence of SEQ ID NO: 92 and a light chain comprising the amino acid sequence of SEQ ID NO: 93.

[0141] In some embodiments, the anti-TfR antibody of the present disclosure comprises a heavy chain comprising the amino acid sequence of SEQ ID NO: 94 and a light chain comprising the amino acid sequence of SEQ ID NO: 95.

[0142] In some embodiments, the anti-TfR antibody of the present disclosure comprises a heavy chain comprising the amino acid sequence of SEQ ID NO: 92 and a light chain comprising the amino acid sequence of SEQ ID NO: 95.

[0143] In some embodiments, the anti-TfR antibody of the present disclosure comprises a heavy chain comprising the amino acid sequence of SEQ ID NO: 156 and a light chain comprising the amino acid sequence of SEQ ID NO: 157.

[0144] In some embodiments, the anti-TfR antibody is a Fab fragment, Fab′ fragment, or F(ab′)₂ fragment of an intact antibody (full-length antibody). Antigen binding fragment of an intact antibody (full-length antibody) can be prepared via routine methods (e.g., recombinantly or by digesting the heavy chain constant region of a full length IgG using an enzyme such as papain). For example, F(ab′)₂ fragments can be produced by pepsin or papain digestion of an antibody molecule, and Fab fragments that can be generated by reducing the disulfide bridges of F(ab′)₂ fragments. In some embodiments, a heavy chain constant region in a Fab′ fragment of the anti-TfR1 antibody described herein comprises the amino acid sequence of:

(SEQ ID NO: 96)
ASTKGPSVFPLAPSSKSTSGGTAALGCLVKDYFPEPVTVSWNSG
ALTSGVHTFPAVLQSSGLYSLSSVVTVPSSSLGTQTYICNVNHK
PSNTKVDKKVEPKSCDKTHT

[0145] In some embodiments, the anti-TfR antibody described herein comprises a heavy chain comprising any one of the VH as listed in Table 3 or any variants thereof and a heavy chain constant region that is at least 80%, at least 85%, at least 90%, at least 95%, or at least 99% identical to SEQ ID NO: 96. In some embodiments, the anti-TfR antibody described herein comprises a heavy chain comprising any one of the VH as listed in Table 3 or any variants thereof and a heavy chain constant region that contains no more than 25 amino acid variations (e.g., no more than 25, 24, 23, 22, 21, 20, 19, 18, 17, 16, 15, 14, 13, 12, 11, 10, 9, 8, 7, 6, 5, 4, 3, 2, or 1 amino acid variation) as compared with SEQ ID NO: 96. In some embodiments, the anti-TfR antibody described herein comprises a heavy chain comprising any one of the VH as listed in Table 3 or any variants thereof and a heavy chain constant region as set forth in SEQ ID NO: 96.

[0146] In some embodiments, the anti-TfR antibody described herein comprises a light chain comprising any one of the VL as listed in Table 3 or any variants thereof and a light chain constant region that is at least 80%, at least 85%, at least 90%, at least 95%, or at least 99% identical to SEQ ID NO: 83. In some embodiments, the anti-TfR antibody described herein comprises a light chain comprising any one of the VL as listed in Table 3 or any variants thereof and a light chain constant region contains no more than 25 amino acid variations (e.g., no more than 25, 24, 23, 22, 21, 20, 19, 18, 17, 16, 15, 14, 13, 12, 11, 10, 9, 8, 7, 6, 5, 4, 3, 2, or 1 amino acid variation) as compared with SEQ TD NO: 83. In some embodiments, the anti-TfR antibody described herein comprises a light chain comprising any one of the VL as listed in Table 3 or any variants thereof and a light chain constant region set forth in SEQ TD NO: 83.

[0147] Examples of Fab heavy chain and light chain amino acid sequences of the anti-TfR antibodies described are provided in Table 5 below.

TABLE 5
Heavy chain and light chain sequences of examples of anti-TfR Fabs

| Antibody | Fab Heavy Chain/Light Chain Sequences** |
|---|---|
| 3A4 | Heavy Chain (with partial human IgG1 constant region): |
| VH3 (N54T*)/Vκ4 | EVQLVQSGSELKKPGASVKVSCTASGFNIKDDYMYWVRQPPGKGLEWIGWIDPET |
| | GDTEYASKFQDRVTVTADTSTNTAYMELSSLRSEDTAVYYCTLWLRRGLDYWG |
| | QGTLVTVSSASTKGPSVFPLAPSSKSTSGGTAALGCLVKDYFPEPVTVSWNSGALTS |
| | GVHTFPAVLQSSGLYSLSSVVTVPSSSLGTQTYICNVNHKPSNTKVDKKVEPKSCDK |
| | THT (SEQ ID NO: 97) |
| | Light Chain (with kappa light chain constant region): |
| | DIVMTQSPLSLPVTPGEPASISCRSSKSLLHSNGYTYLFWFQQRPGQSPRLLIYRMS |
| | NLASGVPDRFSGSGSGTDFTLKISRVEAEDVGVYYCMQHLEYPFTFGGGTKVEIKR |
| | TVAAPSVFIFPPSDEQLKSGTASVVCLLNNFYPREAKVQWKVDNALQSGNSQESVT |
| | EQDSKDSTYSLSSTLTLSKADYEKHKVYACEVTHQGLSSPVTKSFNRGEC (SEQ ID |
| | NO: 85) |
| 3A4 | Heavy Chain (with partial human IgG1 constant region): |
| VH3 (N54S*)/Vκ4 | EVQLVQSGSELKKPGASVKVSCTASGFNIKDDYMYWVRQPPGKGLEWIGWIDPES |
| | GDTEYASKFQDRVTVTADTSTNTAYMELSSLRSEDTAVYYCTLWLRRGLDYWG |
| | QGTLVTVSSASTKGPSVFPLAPSSKSTSGGTAALGCLVKDYFPEPVTVSWNSGALTS |
| | GVHTFPAVLQSSGLYSLSSVVTVPSSSLGTQTYICNVNHKPSNTKVDKKVEPKSCDK |
| | THT (SEQ ID NO: 98) |
| | Light Chain (with kappa light chain constant region): |
| | DIVMTQSPLSLPVTPGEPASISCRSSKSLLHSNGYTYLFWFQQRPGQSPRLLIYRMS |
| | NLASGVPDRFSGSGSGTDFTLKISRVEAEDVGVYYCMQHLEYPFTFGGGTKVEIKR |
| | TVAAPSVFIFPPSDEQLKSGTASVVCLLNNFYPREAKVQWKVDNALQSGNSQESVT |
| | EQDSKDSTYSLSSTLTLSKADYEKHKVYACEVTHQGLSSPVTKSFNRGEC (SEQ ID |
| | NO: 85) |
| 3A4 | Heavy Chain (with partial human IgG1 constant region): |
| VH3/Vκ4 | EVQLVQSGSELKKPGASVKVSCTASGFNIKDDYMYWVRQPPGKGLEWIGWIDPEN |
| | GDTEYASKFQDRVTVTADTSTNTAYMELSSLRSEDTAVYYCTLWLRRGLDYWG |
| | QGTLVTVSSASTKGPSVFPLAPSSKSTSGGTAALGCLVKDYFPEPVTVSWNSGALTS |
| | GVHTFPAVLQSSGLYSLSSVVTVPSSSLGTQTYICNVNHKPSNTKVDKKVEPKSCDK |
| | THT (SEQ ID NO: 99) |
| | Light Chain (with kappa light chain constant region): |
| | DIVMTQSPLSLPVTPGEPASISCRSSKSLLHSNGYTYLFWFQQRPGQSPRLLIYRMS |
| | NLASGVPDRFSGSGSGTDFTLKISRVEAEDVGVYYCMQHLEYPFTFGGGTKVEIKR |
| | TVAAPSVFIFPPSDEQLKSGTASVVCLLNNFYPREAKVQWKVDNALQSGNSQESVT |
| | EQDSKDSTYSLSSTLTLSKADYEKHKVYACEVTHQGLSSPVTKSFNRGEC (SEQ ID |
| | NO: 85) |
| 3M12 | Heavy Chain (with partial human IgG1 constant region): |
| VH3/Vκ2 | QVQLQESGPGLVKPSQTLSLTCSVTGYSITSGYYWNWIRQPPGKGLEWMGYITFD |
| | GANNYNPSLKNRVSISRDTSKNQFSLKLSSVTAEDTATYYCTRSSYDYDVLDYWG |
| | QGTTVTVSSASTKGPSVFPLAPSSKSTSGGTAALGCLVKDYFPEPVTVSWNSGALTS |
| | GVHTFPAVLQSSGLYSLSSVVTVPSSSLGTQTYICNVNHKPSNTKVDKKVEPKSCDK |
| | THT (SEQ ID NO: 100) |
| | Light Chain (with kappa light chain constant region): |
| | DIQMTQSPSSLSASVGDRVTITCRASQDISNFLNWYQQKPGQPVKLLIYYTSRLHS |
| | GVPSRFSGSGSGTDFTLTISSLQPEDFATYFCQQGHTLPYTFGQGTKLEIKRTVAAP |
| | SVFIFPPSDEQLKSGTASVVCLLNNFYPREAKVQWKVDNALQSGNSQESVTEQDSK |
| | DSTYSLSSTLTLSKADYEKHKVYACEVTHQGLSSPVTKSFNRGEC (SEQ ID NO: 89) |
| 3M12 | Heavy Chain (with partial human IgG1 constant region): |
| VH3/Vκ3 | QVQLQESGPGLVKPSQTLSLTCSVTGYSITSGYYWNWIRQPPGKGLEWMGYITFD |
| | GANNYNPSLKNRVSISRDTSKNQFSLKLSSVTAEDTATYYCTRSSYDYDVLDYWG |
| | QGTTVTVSSASTKGPSVFPLAPSSKSTSGGTAALGCLVKDYFPEPVTVSWNSGALTS |
| | GVHTFPAVLQSSGLYSLSSVVTVPSSSLGTQTYICNVNHKPSNTKVDKKVEPKSCDK |
| | THT (SEQ ID NO: 100) |
| | Light Chain (with kappa light chain constant region): |
| | DIQMTQSPSSLSASVGDRVTITCRASQDISNFLNWYQQKPGQPVKLLIYYTSRLHS |
| | GVPSRFSGSGSGTDFTLTISSLQPEDFATYYCQQGHTLPYTFGQGTKLEIKRTVAAP |
| | SVFIFPPSDEQLKSGTASVVCLLNNFYPREAKVQWKVDNALQSGNSQESVTEQDSK |
| | DSTYSLSSTLTLSKADYEKHKVYACEVTHQGLSSPVTKSFNRGEC (SEQ ID NO: 90) |
| 3M12 | Heavy Chain (with partial human IgG1 constant region): |
| VH4/Vκ2 | QVQLQESGPGLVKPSQTLSLTCTVTGYSITSGYYWNWIRQPPGKGLEWIGYITFDG |
| | ANNYNPSLKNRVSISRDTSKNQFSLKLSSVTAEDTATYYCTRSSYDYDVLDYWGQ |
| | GTTVTVSSASTKGPSVFPLAPSSKSTSGGTAALGCLVKDYFPEPVTVSWNSGALTSG |
| | VHTFPAVLQSSGLYSLSSVVTVPSSSLGTQTYICNVNHKPSNTKVDKKVEPKSCDKT |
| | HT (SEQ ID NO: 101) |
| | Light Chain (with kappa light chain constant region): |
| | DIQMTQSPSSLSASVGDRVTITCRASQDISNFLNWYQQKPGQPVKLLIYYTSRLHS |
| | GVPSRFSGSGSGTDFTLTISSLQPEDFATYFCQQGHTLPYTFGQGTKLEIKRTVAAP |
| | SVFIFPPSDEQLKSGTASVVCLLNNFYPREAKVQWKVDNALQSGNSQESVTEQDSK |
| | DSTYSLSSTLTLSKADYEKHKVYACEVTHQGLSSPVTKSFNRGEC (SEQ ID NO: 89) |
| 3M12 | Heavy Chain (with partial human IgG1 constant region): |
| VH4/Vκ3 | QVQLQESGPGLVKPSQTLSLTCTVTGYSITSGYYWNWIRQPPGKGLEWIGYITFDG |
| | ANNYNPSLKNRVSISRDTSKNQFSLKLSSVTAEDTATYYCTRSSYDYDVLDYWGQ |
| | GTTVTVSSASTKGPSVFPLAPSSKSTSGGTAALGCLVKDYFPEPVTVSWNSGALTSG |
| | VHTFPAVLQSSGLYSLSSVVTVPSSSLGTQTYICNVNHKPSNTKVDKKVEPKSCDKT |
| | HT (SEQ ID NO: 101) |
| | Light Chain (with kappa light chain constant region): |
| | DIQMTQSPSSLSASVGDRVTITCRASQDISNFLNWYQQKPGQPVKLLIYYTSRLHS |
| | GVPSRFSGSGSGTDFTLTISSLQPEDFATYYCQQGHTLPYTFGQGTKLEIKRTVAAP |
| | SVFIFPPSDEQLKSGTASVVCLLNNFYPREAKVQWKVDNALQSGNSQESVTEQDSK |
| | DSTYSLSSTLTLSKADYEKHKVYACEVTHQGLSSPVTKSFNRGEC (SEQ ID NO: 90) |
| 5H12 | Heavy Chain (with partial human IgG1 constant region): |
| VH5 (C33Y*)/Vκ3 | QVQLVQSGAEVKKPGASVKVSCKASGYSFTDYYINWVRQAPGQGLEWMGWIYP |
| | GSGNTRYSERFKGRVTITRDTSASTAYMELSSLRSEDTAVYYCAREDYYPYHGM |
| | DYWGQGTLVTVSSASTKGPSVFPLAPSSKSTSGGTAALGCLVKDYFPEPVTVSWNS |
| | GALTSGVHTFPAVLQSSGLYSLSSVVTVPSSSLGTQTYICNVNHKPSNTKVDKKVEP |
| | KSCDKTHT (SEQ ID NO: 102) |
| | Light Chain (with kappa light chain constant region): |
| | DIVLTQSPDSLAVSLGERATINCRASESVDGYDNSFMHWYQQKPGQPPKLLIFRAS |
| | NLESGVPDRESGSGSRTDFTLTISSLQAEDVAVYYCQQSSEDPWTFGQGTKLEIKR |
| | TVAAPSVFIFPPSDEQLKSGTASVVCLLNNFYPREAKVQWKVDNALQSGNSQESVT |
| | EQDSKDSTYSLSSTLTLSKADYEKHKVYACEVTHQGLSSPVTKSFNRGEC (SEQ ID |
| | NO: 93) |
| 5H12 | Heavy Chain (with partial human IgG1 constant region): |
| VH5 (C33D*)/Vκ4 | QVQLVQSGAEVKKPGASVKVSCKASGYSFTDYDINWVRQAPGQGLEWMGWIYP |
| | GSGNTRYSERFKGRVTITRDTSASTAYMELSSLRSEDTAVYYCAREDYYPYHGM |
| | DYWGQGTLVTVSSASTKGPSVFPLAPSSKSTSGGTAALGCLVKDYFPEPVTVSWNS |
| | GALTSGVHTFPAVLQSSGLYSLSSVVTVPSSSLGTQTYICNVNHKPSNTKVDKKVEP |
| | KSCDKTHT (SEQ ID NO: 103) |
| | Light Chain (with kappa light chain constant region): |
| | DIVMTQSPDSLAVSLGERATINCRASESVDGYDNSFMHWYQQKPGQPPKLLIFRAS |
| | NLESGVPDRFSGSGSGTDFTLTISSLQAEDVAVYYCQQSSEDPWTFGQGTKLEIKR |
| | TVAAPSVFIFPPSDEQLKSGTASVVCLLNNFYPREAKVQWKVDNALQSGNSQESVT |
| | EQDSKDSTYSLSSTLTLSKADYEKHKVYACEVTHQGLSSPVTKSFNRGEC (SEQ ID |
| | NO: 95) |
| 5H12 | Heavy Chain (with partial human IgG1 constant region): |
| VH5 (C33Y*)/Vκ4 | QVQLVQSGAEVKKPGASVKVSCKASGYSFTDYYINWVRQAPGQGLEWMGWIYP |
| | GSGNTRYSERFKGRVTITRDTSASTAYMELSSLRSEDTAVYYCAREDYYPYHGM |
| | DYWGQGTLVTVSSASTKGPSVFPLAPSSKSTSGGTAALGCLVKDYFPEPVTVSWNS |
| | GALTSGVHTFPAVLQSSGLYSLSSVVTVPSSSLGTQTYICNVNHKPSNTKVDKKVEP |
| | KSCDKTHT (SEQ ID NO: 102) |
| | Light Chain (with kappa light chain constant region): |
| | DIVMTQSPDSLAVSLGERATINCRASESVDGYDNSFMHWYQQKPGQPPKLLIFRAS |
| | NLESGVPDRFSGSGSGTDFTLTISSLQAEDVAVYYCQQSSEDPWTFGQGTKLEIKR |
| | TVAAPSVFIFPPSDEQLKSGTASVVCLLNNFYPREAKVQWKVDNALQSGNSQESVT |
| | EQDSKDSTYSLSSTLTLSKADYEKHKVYACEVTHQGLSSPVTKSFNRGEC (SEQ ID |
| | NO: 95) |
| Anti-TfR clone 8 | Heavy chain (with partial human IgG1 constant region): |
| Version 1 | QVQLVQSGAEVKKPGESLKISCKGSGYSFTSYWIGWVRQMPGKGLEWMGIIYPGD |
| | SDTRYSPSFQGQVTISADKSISTAYLQWSSLKASDTAMYYCARFPYDSSGYYSFDY |
| | WGQGTLVTVSSASTKGPSVFPLAPSSKSTSGGTAALGCLVKDYFPEPVTVSWNSGA |
| | LTSGVHTFPAVLQSSGLYSLSSVVTVPSSSLGTQTYICNVNHKPSNTKVDKKVEPKS |
| | CDKTHTCP (SEQ ID NO: 158) |
| | Light chain (with kappa light chain constant region): |
| | DIQMTQSPSSLSASVGDRVTITCRASQSISSYLNWYQQKPGKAPKLLIYAASSLQSG |
| | VPSRFSGSGSGTDFTLTISSLQPEDFATYYCQQSYSTPLTFGGGTKVEIKRTVAAPSV |
| | FIFPPSDEQLKSGTASVVCLLNNFYPREAKVQWKVDNALQSGNSQESVTEQDSKDS |
| | TYSLSSTLTLSKADYEKHKVYACEVTHQGLSSPVTKSFNRGEC (SEQ ID NO: 157) |
| Anti-TfR clone 8 | Heavy chain (with partial human IgG1 constant region): |
| Version 2 | QVQLVQSGAEVKKPGESLKISCKGSGYSFTSYWIGWVRQMPGKGLEWMGIIYPGD |
| | SDTRYSPSFQGQVTISADKSISTAYLQWSSLKASDTAMYYCARFPYDSSGYYSFDY |
| | WGQGTLVTVSSASTKGPSVFPLAPSSKSTSGGTAALGCLVKDYFPEPVTVSWNSGA |
| | LTSGVHTFPAVLQSSGLYSLSSVVTVPSSSLGTQTYICNVNHKPSNTKVDKKVEPKS |
| | CDKTHT (SEQ ID NO: 159) |
| | Light chain (with kappa light chain constant region): |
| | DIQMTQSPSSLSASVGDRVTITCRASQSISSYLNWYQQKPGKAPKLLIYAASSLQSG |
| | VPSRFSGSGSGTDFTLTISSLQPEDFATYYCQQSYSTPLTFGGGTKVEIKRTVAAPSV |
| | FIFPPSDEQLKSGTASVVCLLNNFYPREAKVQWKVDNALQSGNSQESVTEQDSKDS |
| | TYSLSSTLTLSKADYEKHKVYACEVTHQGLSSPVTKSFNRGEC (SEQ ID NO: 157) |

*mutation positions are according to Kabat numbering of the respective VH sequences containing the mutations
**CDRs according to the Kabat numbering system are bolded; VH/VL sequences underlined

[0148] In some embodiments, the anti-TfR antibody of the present disclosure comprises a heavy chain containing no more than 25 amino acid variations (e.g., no more than 25, 24, 23, 22, 21, 20, 19, 18, 17, 16, 15, 14, 13, 12, 11, 10, 9, 8, 7, 6, 5, 4, 3, 2, or 1 amino acid variation) as compared with the heavy chain as set forth in any one of SEQ ID NOs: 97-103, 158 and 159. Alternatively or in addition (e.g., in addition), the anti-TfR antibody of the present disclosure comprises a light chain containing no more than 25 amino acid variations (e.g., no more than 25, 24, 23, 22, 21, 20, 19, 18, 17, 16, 15, 14, 13, 12, 11, 10, 9, 8, 7, 6, 5, 4, 3, 2, or 1 amino acid variation) as compared with the light chain as set forth in any one of SEQ ID NOs: 85, 89, 90, 93, 95, and 157.

[0149] In some embodiments, the anti-TfR antibody described herein comprises a heavy chain comprising an amino acid sequence that is at least 75% (e.g., 75%, 80%, 85%, 90%, 95%, 98%, or 99%) identical to any one of SEQ ID NOs: 97-103, 158 and 159. Alternatively or in addition (e.g., in addition), the anti-TfR antibody described herein comprises a light chain comprising an amino acid sequence that is at least 75% (e.g., 75%, 80%, 85%, 90%, 95%, 98%, or 99%) identical to any one of SEQ ID NOs: 85, 89, 90, 93, 95, and 157. In some embodiments, the anti-TfR antibody described herein comprises a heavy chain comprising the amino acid sequence of any one of SEQ ID NOs: 97-103, 158 and 159. Alternatively or in addition (e.g., in addition), the anti-TfR antibody described herein comprises a light chain comprising the amino acid sequence of any one of SEQ ID NOs: 85, 89, 90, 93, 95, and 157.

[0150] In some embodiments, the anti-TfR antibody of the present disclosure comprises a heavy chain comprising the amino acid sequence of SEQ ID NO: 97 and a light chain comprising the amino acid sequence of SEQ ID NO: 85.

[0151] In some embodiments, the anti-TfR antibody of the present disclosure comprises a heavy chain comprising the amino acid sequence of SEQ ID NO: 98 and a light chain comprising the amino acid sequence of SEQ ID NO: 85.

[0152] In some embodiments, the anti-TfR antibody of the present disclosure comprises a heavy chain comprising the amino acid sequence of SEQ ID NO: 99 and a light chain comprising the amino acid sequence of SEQ ID NO: 85.

[0153] In some embodiments, the anti-TfR antibody of the present disclosure comprises a heavy chain comprising the amino acid sequence of SEQ ID NO: 100 and a light chain comprising the amino acid sequence of SEQ ID NO: 89.

[0154] In some embodiments, the anti-TfR antibody of the present disclosure comprises a heavy chain comprising the amino acid sequence of SEQ ID NO: 100 and a light chain comprising the amino acid sequence of SEQ ID NO: 90.

[0155] In some embodiments, the anti-TfR antibody of the present disclosure comprises a heavy chain comprising the amino acid sequence of SEQ ID NO: 101 and a light chain comprising the amino acid sequence of SEQ ID NO: 89.

[0156] In some embodiments, the anti-TfR antibody of the present disclosure comprises a heavy chain comprising the amino acid sequence of SEQ ID NO: 101 and a light chain comprising the amino acid sequence of SEQ ID NO: 90.

[0157] In some embodiments, the anti-TfR antibody of the present disclosure comprises a heavy chain comprising the amino acid sequence of SEQ ID NO: 102 and a light chain comprising the amino acid sequence of SEQ ID NO: 93.

[0158] In some embodiments, the anti-TfR antibody of the present disclosure comprises a heavy chain comprising the amino acid sequence of SEQ ID NO: 103 and a light chain comprising the amino acid sequence of SEQ ID NO: 95.

[0159] In some embodiments, the anti-TfR antibody of the present disclosure comprises a heavy chain comprising the amino acid sequence of SEQ ID NO: 102 and a light chain comprising the amino acid sequence of SEQ ID NO: 95.

[0160] In some embodiments, the anti-TfR antibody of the present disclosure comprises a heavy chain comprising the amino acid sequence of SEQ ID NO: 158 and a light chain comprising the amino acid sequence of SEQ ID NO: 157.

[0161] In some embodiments, the anti-TfR antibody of the present disclosure comprises a heavy chain comprising the amino acid sequence of SEQ ID NO: 159 and a light chain comprising the amino acid sequence of SEQ ID NO: 157.

### Other Known Anti-TfR Antibodies

[0162] Any other appropriate anti-TfR antibodies known in the art may be used as the muscle-targeting agent in the complexes disclosed herein. Examples of known anti-TfR antibodies, including associated references and binding epitopes, are listed in Table 6. In some embodiments, the anti-TfR antibody comprises the complementarity determining regions (CDR-H1, CDR-H2, CDR-H3, CDR-L1, CDR-L2, and CDR-L3) of any of the anti-TfR antibodies provided herein, e.g., anti-TfR antibodies listed in Table 6.

TABLE 6
List of anti-TfR antibody clones, including associated
references and binding epitope information.

| Antibody | | |
|---|---|---|
| Clone Name | Reference(s) | Epitope/Notes |
| OKT9 | U.S. Pat. No. 4,364,934, filed Dec. 4, 1979, | Apical domain of TfR |
| | entitled “MONOCLONAL ANTIBODY | (residues 305-366 of |
| | TO A HUMAN EARLY THYMOCYTE | human TfR sequence |
| | ANTIGEN AND METHODS FOR | XM_052730.3, |
| | PREPARING SAME” | available in GenBank) |
| | Schneider C. et al. “Structural features of | |
| | the cell surface receptor for transferrin that | |
| | is recognized by the monoclonal antibody | |
| | OKT9.” J Biol Chem. 1982, 257: 14, | |
| | 8516-8522. | |
| (From JCR) | WO 2015/098989, filed | Apical domain |
| Clone M11 | Dec. 24, 2014, “Novel anti-Transferrin | (residues 230-244 and |
| Clone M23 | receptor antibody that passes through | 326-347 of TfR) and |
| Clone M27 | blood-brain barrier” | protease-like domain |
| Clone B84 | U.S. Pat. No. 9,994,641, filed | (residues 461-473) |
| | Dec. 24, 2014, “Novel anti-Transferrin | |
| | receptor antibody that passes through | |
| | blood-brain barrier” | |
| (From | WO 2016/081643, filed May 26, 2016, | Apical domain and |
| Genentech) | entitled “ANTI-TRANSFERRIN | non-apical regions |
| 7A4, 8A2, | RECEPTOR ANTIBODIES AND | |
| 15D2, 10D11, | METHODS OF USE” | |
| 7B10, 15G11, | U.S. Pat. No. 9,708,406, filed | |
| 16G5, 13C3, | May 20, 2014, “Anti-transferrin receptor | |
| 16G4, 16F6, | antibodies and methods of use” | |
| 7G7, 4C2, | | |
| 1B12, and | | |
| 13D4 | | |
| (From | Lee et al. “Targeting Rat Anti- | |
| Armagen) | Mouse Transferrin Receptor Monoclonal | |
| 8D3 | Antibodies through Blood-Brain Barrier in | |
| | Mouse” 2000, J Pharmacol. Exp. Ther., | |
| | 292: 1048-1052. | |
| | U.S. patent application 2010/077498, filed | |
| | Sep. 11, 2008, entitled “COMPOSITIONS | |
| | AND METHODS FOR BLOOD-BRAIN | |
| | BARRIER DELIVERY IN THE MOUSE” | |
| OX26 | Haobam, B. et al. 2014. Rab17- | |
| | mediated recycling endosomes contribute | |
| | to autophagosome formation in response to | |
| | Group A Streptococcus invasion. Cellular | |
| | microbiology. 16: 1806-21. | |
| DF1513 | Ortiz-Zapater E et al. Trafficking | |
| | of the human transferrin receptor in plant | |
| | cells: effects of tyrphostin A23 and | |
| | brefeldin A. Plant J 48: 757-70 (2006). | |
| 1A1B2, | Commercially available anti- | Novus Biologicals |
| 66IG10, | transferrin receptor antibodies. | 8100 Southpark Way, |
| MEM-189, | | A-8 Littleton CO |
| JF0956, 29806, | | 80120 |
| 1A1B2, | | |
| TFRC/1818, | | |
| 1E6, 66Ig10, | | |
| TFRC/1059, | | |
| Q1/71, 23D10, | | |
| 13E4, | | |
| TFRC/1149, | | |
| ER-MP21, | | |
| YTA74.4, | | |
| BU54, 2B6, | | |
| RI7 217 | | |
| (From | U.S. patent application 2011/0311544A1, | Does not compete |
| INSERM) | filed Jun. 15, 2005, entitled “ANTI-CD71 | with OKT9 |
| BA120g | MONOCLONAL ANTIBODIES AND | |
| | USES THEREOF FOR TREATING | |
| | MALIGNANT TUMOR CELLS” | |
| LUCA31 | U.S. Pat. No. 7,572,895, filed | “LUCA31 epitope” |
| | Jun. 7, 2004, entitled “TRANSFERRIN | |
| | RECEPTOR ANTIBODIES” | |
| (Salk Institute) | Trowbridge, I. S. et al. “Anti-transferrin | |
| B3/25 | receptor monoclonal antibody and | |
| T58/30 | toxin-antibody conjugates affect | |
| | growth of human tumour cells.” | |
| | Nature, 1981, volume 294, pages | |
| | 171-173 | |
| R17 217.1.3, | Commercially available anti- | BioXcell |
| 5E9C11, | transferrin receptor antibodies. | 10 Technology Dr., |
| OKT9 | | Suite 2B |
| BE0023 | | West Lebanon, NH |
| clone) | | 03784-1671 USA |
| BK19.9, | Gatter, K. C. et al. “Transferrin | |
| B3/25, T56/14 | receptors in human tissues: their | |
| and T58/1 | distribution and possible clinical | |
| | relevance.” J Clin Pathol. 1983 | |
| | May; 36(5): 539-45. | |

[0163] In some embodiments, anti-TfR antibodies of the present disclosure include one or more of the CDR-H (e.g., CDR-H1, CDR-H2, and CDR-H3) amino acid sequences from any one of the anti-TfR antibodies selected from Table 6. In some embodiments, anti-TfR antibodies include the CDR-L1, CDR-L2, and CDR-L3 as provided for any one of the anti-TfR antibodies selected from Table 6. In some embodiments, anti-transferrin antibodies include the CDR-H1, CDR-H2, CDR-H3, CDR-L1, CDR-L2, and CDR-L3 as provided for any one of the anti-TfR antibodies selected from Table 6.

[0164] In some embodiments, anti-TfR antibodies of the disclosure include any antibody that includes a heavy chain variable domain and/or (e.g., and) a light chain variable domain of any anti-TfR antibody, such as any one of the anti-TfR antibodies selected from Table 6. In some embodiments, anti-TfR antibodies of the disclosure include any antibody that includes the heavy chain variable and light chain variable pairs of any anti-TfR antibody, such as any one of the anti-TfR antibodies selected from Table 6.

[0165] Aspects of the disclosure provide anti-TfR antibodies having a heavy chain variable (VH) and/or (e.g., and) a light chain variable (VL) domain amino acid sequence homologous to any of those described herein. In some embodiments, the anti-TfR antibody comprises a heavy chain variable sequence or a light chain variable sequence that is at least 75% (e.g., 80%, 85%, 90%, 95%, 98%, or 99%) identical to the heavy chain variable sequence and/or any light chain variable sequence of any anti-TfR antibody, such as any one of the anti-TfR antibodies selected from Table 6. In some embodiments, the homologous heavy chain variable and/or (e.g., and) a light chain variable amino acid sequences do not vary within any of the CDR sequences provided herein. For example, in some embodiments, the degree of sequence variation (e.g., 75%, 80%, 85%, 90%, 95%, 98%, or 99%) may occur within a heavy chain variable and/or (e.g., and) a light chain variable sequence excluding any of the CDR sequences provided herein. In some embodiments, any of the anti-TfR antibodies provided herein comprise a heavy chain variable sequence and a light chain variable sequence that comprises a framework sequence that is at least 75%, 80%, 85%, 90%, 95%, 98%, or 99% identical to the framework sequence of any anti-TfR antibody, such as any one of the anti-TfR antibodies selected from Table 6.

[0166] An example of a transferrin receptor antibody that may be used in accordance with the present disclosure is described in International Application Publication WO 2016/081643, incorporated herein by reference. The amino acid sequences of this antibody are provided in Table 7.

TABLE 7
Heavy chain and light chain CDRs of an example of a known anti-TfR

| CDRs | Kabat | Chothia | Contact |
|---|---|---|---|
| CDR-H1 | SYWMH (SEQ ID | GYTFTSY (SEQ ID NO: 116) | TSYWMH (SEQ ID NO: 118) |
| | NO: 110) | | |
| CDR-H2 | EINPTNGRTNYIE | NPTNGR (SEQ ID NO: 117) | WIGEINPTNGRTN (SEQ ID |
| | KFKS (SEQ ID | | NO: 119) |
| | NO: 111) | | |
| CDR-H3 | GTRAYHY (SEQ | GTRAYHY (SEQ ID NO: | ARGTRA (SEQ ID NO: 120) |
| | ID NO: 112) | 112) | |
| CDR-L1 | RASDNLYSNLA | RASDNLYSNLA (SEQ ID | YSNLAWY (SEQ ID NO: 121) |
| | (SEQ ID NO: 113) | NO: 113) | |
| CDR-L2 | DATNLAD (SEQ | DATNLAD (SEQ ID NO: | LLVYDATNLA (SEQ ID NO: |
| | ID NO: 114) | 114) | 122) |
| CDR-L3 | QHFWGTPLT | QHFWGTPLT | QHFWGTPL (SEQ ID NO: |
| | (SEQ ID NO: 115) | (SEQ ID NO: 115) | 123) |

| | |
|---|---|
| Murine VH | QVQLQQPGAELVKPGASVKLSCKASGYTFTSYWMHWVKQRPGQGLEWIGEINP |
| | TNGRTNYIEKFKSKATLTVDKSSSTAYMQLSSLTSEDSAVYYCARGTRAYHYW |
| | GQGTSVTVSS (SEQ ID NO: 124) |
| Murine VL | DIQMTQSPASLSVSVGETVTITCRASDNLYSNLAWYQQKQGKSPQLLVYDATNL |
| | ADGVPSRFSGSGSGTQYSLKINSLQSEDFGTYYCQHFWGTPLTFGAGTKLELK |
| | (SEQ ID NO: 125) |
| Humanized VH | EVQLVQSGAEVKKPGASVKVSCKASGYTFTSYWMHWVRQAPGQRLEWIGEIN |
| | PTNGRTNYIEKFKSRATLTVDKSASTAYMELSSLRSEDTAVYYCARGTRAYHY |
| | WGQGTMVTVSS (SEQ ID NO: 128) |
| Humanized VL | DIQMTQSPSSLSASVGDRVTITCRASDNLYSNLAWYQQKPGKSPKLLVYDATNL |
| | ADGVPSRFSGSGSGTDYTLTISSLQPEDFATYYCQHFWGTPLTFGQGTKVEIK |
| | (SEQ ID NO: 129) |
| HC of chimeric | QVQLQQPGAELVKPGASVKLSCKASGYTFTSYWMHWVKQRPGQGLEWIGEINP |
| full-length IgG1 | TNGRTNYIEKFKSKATLTVDKSSSTAYMQLSSLTSEDSAVYYCARGTRAYHYW |
| | GQGTSVTVSSASTKGPSVFPLAPSSKSTSGGTAALGCLVKDYFPEPVTVSWNSG |
| | ALTSGVHTFPAVLQSSGLYSLSSVVTVPSSSLGTQTYICNVNHKPSNTKVDKKVE |
| | PKSCDKTHTCPPCPAPELLGGPSVFLFPPKPKDTLMISRTPEVTCVVVDVSHEDPE |
| | VKFNWYVDGVEVHNAKTKPREEQYNSTYRVVSVLTVLHQDWLNGKEYKCKV |
| | SNKALPAPIEKTISKAKGQPREPQVYTLPPSRDELTKNQVSLTCLVKGFYPSDIAV |
| | EWESNGQPENNYKTTPPVLDSDGSFFLYSKLTVDKSRWQQGNVFSCSVMHEAL |
| | HNHYTQKSLSLSPGK (SEQ ID NO: 132) |
| LC of chimeric | DIQMTQSPASLSVSVGETVTITCRASDNLYSNLAWYQQKQGKSPQLLVYDATNL |
| full-length IgG1 | ADGVPSRFSGSGSGTQYSLKINSLQSEDFGTYYCQHFWGTPLTFGAGTKLELKR |
| | TVAAPSVFIFPPSDEQLKSGTASVVCLLNNFYPREAKVQWKVDNALQSGNSQES |
| | VTEQDSKDSTYSLSSTLTLSKADYEKHKVYACEVTHQGLSSPVTKSFNRGEC |
| | (SEQ ID NO: 133) |
| HC of fully human | EVQLVQSGAEVKKPGASVKVSCKASGYTFTSYWMHWVRQAPGQRLEWIGEIN |
| full-length IgG1 | PTNGRTNYIEKFKSRATLTVDKSASTAYMELSSLRSEDTAVYYCARGTRAYHY |
| | WGQGTMVTVSSASTKGPSVFPLAPSSKSTSGGTAALGCLVKDYFPEPVTVSWNS |
| | GALTSGVHTFPAVLQSSGLYSLSSVVTVPSSSLGTQTYICNVNHKPSNTKVDKKV |
| | EPKSCDKTHTCPPCPAPELLGGPSVFLFPPKPKDTLMISRTPEVTCVVVDVSHEDP |
| | EVKFNWYVDGVEVHNAKTKPREEQYNSTYRVVSVLTVLHQDWLNGKEYKCKVSN |
| | KALPAPIEKTISKAKGQPREPQVYTLPPSRDELTKNQVSLTCLVKGFYPSDIA |
| | VEWESNGQPENNYKTTPPVLDSDGSFFLYSKLTVDKSRWQQGNVFSCSVMHEA |
| | LHNHYTQKSLSLSPGK (SEQ ID NO: 134) |
| LC of fully human | DIQMTQSPSSLSASVGDRVTITCRASDNLYSNLAWYQQKPGKSPKLLVYDATNL |
| full-length IgG1 | ADGVPSRFSGSGSGTDYTLTISSLQPEDFATYYCQHFWGTPLTFGQGTKVEIKRT |
| | VAAPSVFIFPPSDEQLKSGTASVVCLLNNFYPREAKVQWKVDNALQSGNSQESV |
| | TEQDSKDSTYSLSSTLTLSKADYEKHKVYACEVTHQGLSSPVTKSFNRGEC |
| | (SEQ ID NO: 135) |
| HC of chimeric | QVQLQQPGAEL VKPGASVKLSCKASGYTFTSYWMHWVKQRPGQGLEWIGEINP |
| Fab | TNGRTNYIEKFKSKATLTVDKSSSTAYMQLSSLTSEDSAVYYCARGTRAYHYW |
| | GQGTSVTVSSASTKGPSVFPLAPSSKSTSGGTAALGCLVKDYFPEPVTVSWNSG |
| | ALTSGVHTFPAVLQSSGLYSLSSVVTVPSSSLGTQTYICNVNHKPSNTKVDKKVE |
| | PKSCDKTHTCP (SEQ ID NO: 136) |
| HC of fully human | EVOLVQSGAEVKKPGASVKVSCKASGYTFTSYWMHWVRQAPGQRLEWIGEIN |
| Fab | PTNGRTNYIEKFKSRATLTVDKSASTAYMELSSLRSEDTAVYYCARGTRAYHY |
| | WGQGTMVTVSSASTKGPSVFPLAPSSKSTSGGTAALGCLVKDYFPEPVTVSWNS |
| | GALTSGVHTFPAVLQSSGLYSLSSVVTVPSSSLGTQTYICNVNHKPSNTKVDKKV |
| | EPKSCDKTHTCP (SEQ ID NO: 137) |

[0167] In some embodiments, the anti-TfR antibody of the present disclosure comprises a CDR-H1, a CDR-H2, and a CDR-H3 that are the same as the CDR-H1, CDR-H2, and CDR-H3 shown in Table 7. Alternatively or in addition (e.g., in addition), the anti-TfR antibody of the present disclosure comprises a CDR-L1, a CDR-L2, and a CDR-L3 that are the same as the CDR-L1, CDR-L2, and CDR-L3 shown in Table 7.

[0168] In some embodiments, the anti-TfR antibody of the present disclosure comprises a CDR-L3, which contains no more than 3 amino acid variations (e.g., no more than 3, 2, or 1 amino acid variation) as compared with the CDR-L3 as shown in Table 7. In some embodiments, the anti-TfR antibody of the present disclosure comprises a CDR-L3 containing one amino acid variation as compared with the CDR-L3 as shown in Table 7. In some embodiments, the anti-TfR antibody of the present disclosure comprises a CDR-L3 of QHFAGTPLT (SEQ ID NO: 126) according to the Kabat and Chothia definition system) or QHFAGTPL (SEQ ID NO: 127) according to the Contact definition system). In some embodiments, the anti-TfR antibody of the present disclosure comprises a CDR-H1, a CDR-H2, a CDR-H3, a CDR-L1 and a CDR-L2 that are the same as the CDR-H1, CDR-H2, and CDR-H3 shown in Table 7, and comprises a CDR-L3 of QHFAGTPLT (SEQ ID NO: 126) according to the Kabat and Chothia definition system) or QHFAGTPL (SEQ ID NO: 127) according to the Contact definition system).

[0169] In some embodiments, the anti-TfR antibody of the present disclosure comprises heavy chain CDRs that collectively are at least 80% (e.g., 80%, 85%, 90%, 95%, or 98%) identical to the heavy chain CDRs as shown in Table 7. Alternatively or in addition (e.g., in addition), the anti-TfR antibody of the present disclosure comprises light chain CDRs that collectively are at least 80% (e.g., 80%, 85%, 90%, 95%, or 98%) identical to the light chain CDRs as shown in Table 7.

[0170] In some embodiments, the anti-TfR antibody of the present disclosure comprises a VH comprising the amino acid sequence of SEQ ID NO: 124. Alternatively or in addition (e.g., in addition), the anti-TfR antibody of the present disclosure comprises a VL comprising the amino acid sequence of SEQ ID NO: 125.

[0171] In some embodiments, the anti-TfR antibody of the present disclosure comprises a VH comprising the amino acid sequence of SEQ ID NO: 128. Alternatively or in addition (e.g., in addition), the anti-TfR antibody of the present disclosure comprises a VL comprising the amino acid sequence of SEQ ID NO: 129.

[0172] In some embodiments, the anti-TfR antibody of the present disclosure comprises a VH containing no more than 25 amino acid variations (e.g., no more than 25, 24, 23, 22, 21, 20, 19, 18, 17, 16, 15, 14, 13, 12, 11, 10, 9, 8, 7, 6, 5, 4, 3, 2, or 1 amino acid variation) as compared with the VH as set forth in SEQ ID NO: 128. Alternatively or in addition (e.g., in addition), the anti-TfR antibody of the present disclosure comprises a VL containing no more than 15 amino acid variations (e.g., no more than 20, 19, 18, 17, 16, 15, 14, 13, 12, 11, 9, 8, 7, 6, 5, 4, 3, 2, or 1 amino acid variation) as compared with the VL as set forth in SEQ ID NO: 129.

[0173] In some embodiments, the anti-TfR antibody of the present disclosure is a full-length IgG1 antibody, which can include a heavy constant region and a light constant region from a human antibody. In some embodiments, the heavy chain of any of the anti-TfR antibodies as described herein may comprises a heavy chain constant region (CH) or a portion thereof (e.g., CH1, CH2, CH3, or a combination thereof). The heavy chain constant region can of any suitable origin, e.g., human, mouse, rat, or rabbit. In one specific example, the heavy chain constant region is from a human IgG (a gamma heavy chain), e.g., IgG1, IgG2, or IgG4. An example of human IgG1 constant region is given below:

(SEQ ID NO: 81)
[sequence omitted]

[0174] In some embodiments, the light chain of any of the anti-TfR antibodies described herein may further comprise a light chain constant region (CL), which can be any CL known in the art. In some examples, the CL is a kappa light chain. In other examples, the CL is a lambda light chain. In some embodiments, the CL is a kappa light chain, the sequence of which is provided below:

(SEQ ID NO: 83)
[sequence omitted]

[0175] In some embodiments, the anti-TfR antibody described herein is a chimeric antibody that comprises a heavy chain comprising the amino acid sequence of SEQ ID NO: 132. Alternatively or in addition (e.g., in addition), the anti-TfR antibody described herein comprises a light chain comprising the amino acid sequence of SEQ ID NO: 133.

[0176] In some embodiments, the anti-TfR antibody described herein is a fully human antibody that comprises a heavy chain comprising the amino acid sequence of SEQ ID NO: 134. Alternatively or in addition (e.g., in addition), the anti-TfR antibody described herein comprises a light chain comprising the amino acid sequence of SEQ ID NO: 135.

[0177] In some embodiments, the anti-TfR antibody is an antigen binding fragment (Fab) of an intact antibody (full-length antibody). In some embodiments, the anti-TfR Fab described herein comprises a heavy chain comprising the amino acid sequence of SEQ ID NO: 136. Alternatively or in addition (e.g., in addition), the anti-TfR Fab described herein comprises a light chain comprising the amino acid sequence of SEQ ID NO: 133. In some embodiments, the anti-TfR Fab described herein comprises a heavy chain comprising the amino acid sequence of SEQ ID NO: 137. Alternatively or in addition (e.g., in addition), the anti-TfR Fab described herein comprises a light chain comprising the amino acid sequence of SEQ ID NO: 135.

[0178] The anti-TfR antibodies described herein can be in any antibody form, including, but not limited to, intact (i.e., full-length) antibodies, antigen-binding fragments thereof (such as Fab, Fab′, F(ab′)2, Fv), single chain antibodies, bi-specific antibodies, or nanobodies. In some embodiments, the anti-TfR antibody described herein is a scFv. In some embodiments, the anti-TfR antibody described herein is a scFv-Fab (e.g., scFv fused to a portion of a constant region). In some embodiments, the anti-TfR antibody described herein is a scFv fused to a constant region (e.g., human IgG1 constant region as set forth in SEQ ID NO: 81).

[0179] In some embodiments, conservative mutations can be introduced into antibody sequences (e.g., CDRs or framework sequences) at positions where the residues are not likely to be involved in interacting with a target antigen (e.g., transferrin receptor), for example, as determined based on a crystal structure. In some embodiments, one, two or more mutations (e.g., amino acid substitutions) are introduced into the Fc region of an anti-TfR antibody described herein (e.g., in a CH2 domain (residues 231-340 of human IgG1) and/or (e.g., and) CH3 domain (residues 341-447 of human IgG1) and/or (e.g., and) the hinge region, with numbering according to the Kabat numbering system (e.g., the EU index in Kabat)) to alter one or more functional properties of the antibody, such as serum half-life, complement fixation, Fc receptor binding and/or (e.g., and) antigen-dependent cellular cytotoxicity.

[0180] In some embodiments, one, two or more mutations (e.g., amino acid substitutions) are introduced into the hinge region of the Fc region (CH1 domain) such that the number of cysteine residues in the hinge region are altered (e.g., increased or decreased) as described in, e.g., U.S. Pat. No. 5,677,425. The number of cysteine residues in the hinge region of the CH1 domain can be altered to, e.g., facilitate assembly of the light and heavy chains, or to alter (e.g., increase or decrease) the stability of the antibody or to facilitate linker conjugation.

[0181] In some embodiments, one, two or more mutations (e.g., amino acid substitutions) are introduced into the Fc region of a muscle-targeting antibody described herein (e.g., in a CH2 domain (residues 231-340 of human IgG1) and/or (e.g., and) CH3 domain (residues 341-447 of human IgG1) and/or (e.g., and) the hinge region, with numbering according to the Kabat numbering system (e.g., the EU index in Kabat)) to increase or decrease the affinity of the antibody for an Fc receptor (e.g., an activated Fc receptor) on the surface of an effector cell. Mutations in the Fc region of an antibody that decrease or increase the affinity of an antibody for an Fc receptor and techniques for introducing such mutations into the Fc receptor or fragment thereof are known to one of skill in the art. Examples of mutations in the Fc receptor of an antibody that can be made to alter the affinity of the antibody for an Fc receptor are described in, e.g., Smith P et al., (2012) PNAS 109: 6181-6186, U.S. Pat. No. 6,737,056, and International Publication Nos. WO 02/060919; WO 98/23289; and WO 97/34631, which are incorporated herein by reference.

[0182] In some embodiments, one, two or more amino acid mutations (i.e., substitutions, insertions or deletions) are introduced into an IgG constant domain, or FcRn-binding fragment thereof (preferably an Fc or hinge-Fc domain fragment) to alter (e.g., decrease or increase) half-life of the antibody in vivo. See, e.g., International Publication Nos. WO 02/060919; WO 98/23289; and WO 97/34631; and U.S. Pat. Nos. 5,869,046, 6,121,022, 6,277,375 and 6,165,745 for examples of mutations that will alter (e.g., decrease or increase) the half-life of an antibody in vivo.

[0183] In some embodiments, one, two or more amino acid mutations (i.e., substitutions, insertions or deletions) are introduced into an IgG constant domain, or FcRn-binding fragment thereof (preferably an Fc or hinge-Fc domain fragment) to decrease the half-life of the anti-TfR antibody in vivo. In some embodiments, one, two or more amino acid mutations (i.e., substitutions, insertions or deletions) are introduced into an IgG constant domain, or FcRn-binding fragment thereof (preferably an Fc or hinge-Fc domain fragment) to increase the half-life of the antibody in vivo. In some embodiments, the antibodies can have one or more amino acid mutations (e.g., substitutions) in the second constant (CH2) domain (residues 231-340 of human IgG1) and/or (e.g., and) the third constant (CH3) domain (residues 341-447 of human IgG1), with numbering according to the EU index in Kabat (Kabat E A et al., (1991) supra). In some embodiments, the constant region of the IgG1 of an antibody described herein comprises a methionine (M) to tyrosine (Y) substitution in position 252, a serine (S) to threonine (T) substitution in position 254, and a threonine (T) to glutamic acid (E) substitution in position 256, numbered according to the EU index as in Kabat. See U.S. Pat. No. 7,658,921, which is incorporated herein by reference. This type of mutant IgG, referred to as “YTE mutant” has been shown to display fourfold increased half-life as compared to wild-type versions of the same antibody (see Dall'Acqua W F et al., (2006) J Biol Chem 281: 23514-24). In some embodiments, an antibody comprises an IgG constant domain comprising one, two, three or more amino acid substitutions of amino acid residues at positions 251-257, 285-290, 308-314, 385-389, and 428-436, numbered according to the EU index as in Kabat.

[0184] In some embodiments, one, two or more amino acid substitutions are introduced into an IgG constant domain Fc region to alter the effector function(s) of the anti-TfR antibody. The effector ligand to which affinity is altered can be, for example, an Fc receptor or the C1 component of complement. This approach is described in further detail in U.S. Pat. Nos. 5,624,821 and 5,648,260. In some embodiments, the deletion or inactivation (through point mutations or other means) of a constant region domain can reduce Fc receptor binding of the circulating antibody thereby increasing tumor localization. See, e.g., U.S. Pat. Nos. 5,585,097 and 8,591,886 for a description of mutations that delete or inactivate the constant domain and thereby increase tumor localization. In some embodiments, one or more amino acid substitutions may be introduced into the Fc region of an antibody described herein to remove potential glycosylation sites on Fc region, which may reduce Fc receptor binding (see, e.g., Shields R L et al., (2001) J Biol Chem 276: 6591-604).

[0185] In some embodiments, one or more amino in the constant region of an anti-TfR antibody described herein can be replaced with a different amino acid residue such that the antibody has altered Clq binding and/or (e.g., and) reduced or abolished complement dependent cytotoxicity (CDC). This approach is described in further detail in U.S. Pat. No. 6,194,551 (Idusogie et al). In some embodiments, one or more amino acid residues in the N-terminal region of the CH2 domain of an antibody described herein are altered to thereby alter the ability of the antibody to fix complement. This approach is described further in International Publication No. WO 94/29351. In some embodiments, the Fc region of an antibody described herein is modified to increase the ability of the antibody to mediate antibody dependent cellular cytotoxicity (ADCC) and/or (e.g., and) to increase the affinity of the antibody for an Fcγ receptor. This approach is described further in International Publication No. WO 00/42072.

[0186] In some embodiments, the heavy and/or (e.g., and) light chain variable domain(s) sequence(s) of the antibodies provided herein can be used to generate, for example, CDR-grafted, chimeric, humanized, or composite human antibodies or antigen-binding fragments, as described elsewhere herein. As understood by one of ordinary skill in the art, any variant, CDR-grafted, chimeric, humanized, or composite antibodies derived from any of the antibodies provided herein may be useful in the compositions and methods described herein and will maintain the ability to specifically bind transferrin receptor, such that the variant, CDR-grafted, chimeric, humanized, or composite antibody has at least 50%, at least 60%, at least 70%, at least 80%, at least 90%, at least 95% or more binding to transferrin receptor relative to the original antibody from which it is derived.

[0187] In some embodiments, the antibodies provided herein comprise mutations that confer desirable properties to the antibodies. For example, to avoid potential complications due to Fab-arm exchange, which is known to occur with native IgG4 mAbs, the antibodies provided herein may comprise a stabilizing ‘Adair’ mutation (Angal S., et al., “A single amino acid substitution abolishes the heterogeneity of chimeric mouse/human (IgG4) antibody,” Mol Immunol 30, 105-108; 1993), where serine 228 (EU numbering; residue 241 Kabat numbering) is converted to proline resulting in an IgG1-like hinge sequence. Accordingly, any of the antibodies may include a stabilizing ‘Adair’ mutation.

[0188] In some embodiments, an antibody is modified, e.g., modified via glycosylation, phosphorylation, sumoylation, and/or (e.g., and) methylation. In some embodiments, an antibody is a glycosylated antibody, which is conjugated to one or more sugar or carbohydrate molecules. In some embodiments, the one or more sugar or carbohydrate molecule are conjugated to the antibody via N-glycosylation, O-glycosylation, C-glycosylation, glypiation (GPI anchor attachment), and/or (e.g., and) phosphoglycosylation. In some embodiments, the one or more sugar or carbohydrate molecules are monosaccharides, disaccharides, oligosaccharides, or glycans. In some embodiments, the one or more sugar or carbohydrate molecule is a branched oligosaccharide or a branched glycan. In some embodiments, the one or more sugar or carbohydrate molecule includes a mannose unit, a glucose unit, an N-acetylglucosamine unit, an N-acetylgalactosamine unit, a galactose unit, a fucose unit, or a phospholipid unit. In some embodiments, there are about 1-10, about 1-5, about 5-10, about 1-4, about 1-3, or about 2 sugar molecules. In some embodiments, a glycosylated antibody is fully or partially glycosylated. In some embodiments, an antibody is glycosylated by chemical reactions or by enzymatic means. In some embodiments, an antibody is glycosylated in vitro or inside a cell, which may optionally be deficient in an enzyme in the N- or O-glycosylation pathway, e.g. a glycosyltransferase. In some embodiments, an antibody is functionalized with sugar or carbohydrate molecules as described in International Patent Application Publication WO2014065661, published on May 1, 2014, entitled, “Modified antibody, antibody-conjugate and process for the preparation thereof”.

[0189] In some embodiments, any one of the anti-TfR antibodies described herein may comprise a signal peptide in the heavy and/or (e.g., and) light chain sequence (e.g., a N-terminal signal peptide). In some embodiments, the anti-TfR1 antibody described herein comprises any one of the VH and VL sequences, any one of the IgG heavy chain and light chain sequences, or any one of the Fab′ heavy chain and light chain sequences described herein, and further comprises a signal peptide (e.g., a N-terminal signal peptide). In some embodiments, the signal peptide comprises the amino acid sequence of MGWSCIILFLVATATGVHS (SEQ ID NO: 104).

[0190] In some embodiments, an antibody provided herein may have one or more post-translational modifications. In some embodiments, N-terminal cyclization, also called pyroglutamate formation (pyro-Glu), may occur in the antibody at N-terminal Glutamate (Glu) and/or Glutamine (Gln) residues during production. As such, it should be appreciated that an antibody specified as having a sequence comprising an N-terminal glutamate or glutamine residue encompasses antibodies that have undergone pyroglutamate formation resulting from a post-translational modification. In some embodiments, pyroglutamate formation occurs in a heavy chain sequence. In some embodiments, pyroglutamate formation occurs in a light chain sequence.

[0191] b. Other Muscle-Targeting Antibodies

[0192] In some embodiments, the muscle-targeting antibody is an antibody that specifically binds hemojuvelin, caveolin-3, Duchenne muscular dystrophy peptide, myosin IIb, or CD63. In some embodiments, the muscle-targeting antibody is an antibody that specifically binds a myogenic precursor protein. Exemplary myogenic precursor proteins include, without limitation, ABCG2, M-Cadherin/Cadherin-15, Caveolin-1, CD34, FoxK1, Integrin alpha 7, Integrin alpha 7 beta 1, MYF-5, MyoD, Myogenin, NCAM-1/CD56, Pax3, Pax7, and Pax9. In some embodiments, the muscle-targeting antibody is an antibody that specifically binds a skeletal muscle protein. Exemplary skeletal muscle proteins include, without limitation, alpha-Sarcoglycan, beta-Sarcoglycan, Calpain Inhibitors, Creatine Kinase MM/CKMM, eIF5A, Enolase 2/Neuron-specific Enolase, epsilon-Sarcoglycan, FABP3/H-FABP, GDF-8/Myostatin, GDF-11/GDF-8, Integrin alpha 7, Integrin alpha 7 beta 1, Integrin beta 1/CD29, MCAM/CD146, MyoD, Myogenin, Myosin Light Chain Kinase Inhibitors, NCAM-1/CD56, and Troponin I. In some embodiments, the muscle-targeting antibody is an antibody that specifically binds a smooth muscle protein. Exemplary smooth muscle proteins include, without limitation, alpha-Smooth Muscle Actin, VE-Cadherin, Caldesmon/CALD1, Calponin 1, Desmin, Histamine H2 R, Motilin R/GPR38, Transgelin/TAGLN, and Vimentin. However, it should be appreciated that antibodies to additional targets are within the scope of this disclosure and the exemplary lists of targets provided herein are not meant to be limiting.

[0193] c. Antibody Features/Alterations

[0194] In some embodiments, conservative mutations can be introduced into antibody sequences (e.g., CDRs or framework sequences) at positions where the residues are not likely to be involved in interacting with a target antigen (e.g., transferrin receptor), for example, as determined based on a crystal structure. In some embodiments, one, two or more mutations (e.g., amino acid substitutions) are introduced into the Fc region of a muscle-targeting antibody described herein (e.g., in a CH2 domain (residues 231-340 of human IgG1) and/or (e.g., and) CH3 domain (residues 341-447 of human IgG1) and/or (e.g., and) the hinge region, with numbering according to the Kabat numbering system (e.g., the EU index in Kabat)) to alter one or more functional properties of the antibody, such as serum half-life, complement fixation, Fc receptor binding and/or (e.g., and) antigen-dependent cellular cytotoxicity.

[0195] In some embodiments, one, two or more mutations (e.g., amino acid substitutions) are introduced into the hinge region of the Fc region (CH1 domain) such that the number of cysteine residues in the hinge region are altered (e.g., increased or decreased) as described in, e.g., U.S. Pat. No. 5,677,425. The number of cysteine residues in the hinge region of the CH1 domain can be altered to, e.g., facilitate assembly of the light and heavy chains, or to alter (e.g., increase or decrease) the stability of the antibody or to facilitate linker conjugation.

[0196] In some embodiments, one, two or more mutations (e.g., amino acid substitutions) are introduced into the Fc region of a muscle-targeting antibody described herein (e.g., in a CH2 domain (residues 231-340 of human IgG1) and/or (e.g., and) CH3 domain (residues 341-447 of human IgG1) and/or (e.g., and) the hinge region, with numbering according to the Kabat numbering system (e.g., the EU index in Kabat)) to increase or decrease the affinity of the antibody for an Fc receptor (e.g., an activated Fc receptor) on the surface of an effector cell. Mutations in the Fc region of an antibody that decrease or increase the affinity of an antibody for an Fc receptor and techniques for introducing such mutations into the Fc receptor or fragment thereof are known to one of skill in the art. Examples of mutations in the Fc receptor of an antibody that can be made to alter the affinity of the antibody for an Fc receptor are described in, e.g., Smith P et al., (2012) PNAS 109: 6181-6186, U.S. Pat. No. 6,737,056, and International Publication Nos. WO 02/060919; WO 98/23289; and WO 97/34631, which are incorporated herein by reference.

[0197] In some embodiments, one, two or more amino acid mutations (i.e., substitutions, insertions or deletions) are introduced into an IgG constant domain, or FcRn-binding fragment thereof (preferably an Fc or hinge-Fc domain fragment) to alter (e.g., decrease or increase) half-life of the antibody in vivo. See, e.g., International Publication Nos. WO 02/060919; WO 98/23289; and WO 97/34631; and U.S. Pat. Nos. 5,869,046; 6,121,022; 6,277,375; and 6,165,745 for examples of mutations that will alter (e.g., decrease or increase) the half-life of an antibody in vivo.

[0198] In some embodiments, one, two or more amino acid mutations (i.e., substitutions, insertions or deletions) are introduced into an IgG constant domain, or FcRn-binding fragment thereof (preferably an Fc or hinge-Fc domain fragment) to decrease the half-life of the anti-transferrin receptor antibody in vivo. In some embodiments, one, two or more amino acid mutations (i.e., substitutions, insertions or deletions) are introduced into an IgG constant domain, or FcRn-binding fragment thereof (preferably an Fc or hinge-Fc domain fragment) to increase the half-life of the antibody in vivo. In some embodiments, the antibodies can have one or more amino acid mutations (e.g., substitutions) in the second constant (CH2) domain (residues 231-340 of human IgG1) and/or (e.g., and) the third constant (CH3) domain (residues 341-447 of human IgG1), with numbering according to the EU index in Kabat (Kabat E A et al., (1991) supra). In some embodiments, the constant region of the IgG1 of an antibody described herein comprises a methionine (M) to tyrosine (Y) substitution in position 252, a serine (S) to threonine (T) substitution in position 254, and a threonine (T) to glutamic acid (E) substitution in position 256, numbered according to the EU index as in Kabat. See U.S. Pat. No. 7,658,921, which is incorporated herein by reference. This type of mutant IgG, referred to as “YTE mutant” has been shown to display fourfold increased half-life as compared to wild-type versions of the same antibody (see Dall'Acqua W F et al., (2006) J Biol Chem 281: 23514-24). In some embodiments, an antibody comprises an IgG constant domain comprising one, two, three or more amino acid substitutions of amino acid residues at positions 251-257, 285-290, 308-314, 385-389, and 428-436, numbered according to the EU index as in Kabat.

[0199] In some embodiments, one, two or more amino acid substitutions are introduced into an IgG constant domain Fc region to alter the effector function(s) of the anti-transferrin receptor antibody. The effector ligand to which affinity is altered can be, for example, an Fc receptor or the C1 component of complement. This approach is described in further detail in U.S. Pat. Nos. 5,624,821 and 5,648,260. In some embodiments, the deletion or inactivation (through point mutations or other means) of a constant region domain can reduce Fc receptor binding of the circulating antibody thereby increasing tumor localization. See, e.g., U.S. Pat. Nos. 5,585,097 and 8,591,886 for a description of mutations that delete or inactivate the constant domain and thereby increase tumor localization. In some embodiments, one or more amino acid substitutions may be introduced into the Fc region of an antibody described herein to remove potential glycosylation sites on Fc region, which may reduce Fc receptor binding (see, e.g., Shields R L et al., (2001) J Biol Chem 276: 6591-604).

[0200] In some embodiments, one or more amino in the constant region of a muscle-targeting antibody described herein can be replaced with a different amino acid residue such that the antibody has altered Clq binding and/or (e.g., and) reduced or abolished complement dependent cytotoxicity (CDC). This approach is described in further detail in U.S. Pat. No. 6,194,551 (Idusogie et al). In some embodiments, one or more amino acid residues in the N-terminal region of the CH2 domain of an antibody described herein are altered to thereby alter the ability of the antibody to fix complement. This approach is described further in International Publication No. WO 94/29351. In some embodiments, the Fc region of an antibody described herein is modified to increase the ability of the antibody to mediate antibody dependent cellular cytotoxicity (ADCC) and/or (e.g., and) to increase the affinity of the antibody for an Fcγ receptor. This approach is described further in International Publication No. WO 00/42072.

[0201] In some embodiments, the heavy and/or (e.g., and) light chain variable domain(s) sequence(s) of the antibodies provided herein can be used to generate, for example, CDR-grafted, chimeric, humanized, or composite human antibodies or antigen-binding fragments, as described elsewhere herein. As understood by one of ordinary skill in the art, any variant, CDR-grafted, chimeric, humanized, or composite antibodies derived from any of the antibodies provided herein may be useful in the compositions and methods described herein and will maintain the ability to specifically bind transferrin receptor, such that the variant, CDR-grafted, chimeric, humanized, or composite antibody has at least 50%, at least 60%, at least 70%, at least 80%, at least 90%, at least 95% or more binding to transferrin receptor relative to the original antibody from which it is derived.

[0202] In some embodiments, the antibodies provided herein comprise mutations that confer desirable properties to the antibodies. For example, to avoid potential complications due to Fab-arm exchange, which is known to occur with native IgG4 mAbs, the antibodies provided herein may comprise a stabilizing ‘Adair’ mutation (Angal S., et al., “A single amino acid substitution abolishes the heterogeneity of chimeric mouse/human (IgG4) antibody,” Mol Immunol 30, 105-108; 1993), where serine 228 (EU numbering; residue 241 Kabat numbering) is converted to proline resulting in an IgG1-like hinge sequence. Accordingly, any of the antibodies may include a stabilizing ‘Adair’ mutation.

[0203] As provided herein, antibodies of this disclosure may optionally comprise constant regions or parts thereof. For example, a VL domain may be attached at its C-terminal end to a light chain constant domain like Cκ or Cλ. Similarly, a VH domain or portion thereof may be attached to all or part of a heavy chain like IgA, IgD, IgE, IgG, and IgM, and any isotype subclass. Antibodies may include suitable constant regions (see, for example, Kabat et al., Sequences of Proteins of Immunological Interest, No. 91-3242, National Institutes of Health Publications, Bethesda, Md. (1991)). Therefore, antibodies within the scope of this may disclosure include VH and VL domains, or an antigen binding portion thereof, combined with any suitable constant regions.

[0204] ii. Muscle-Targeting Peptides

[0205] Some aspects of the disclosure provide muscle-targeting peptides as muscle-targeting agents. Short peptide sequences (e.g., peptide sequences of 5-20 amino acids in length) that bind to specific cell types have been described. For example, cell-targeting peptides have been described in Vines e., et al., A. “Cell-penetrating and cell-targeting peptides in drug delivery” Biochim Biophys Acta 2008, 1786: 126-38; Jarver P., et al., “In vivo biodistribution and efficacy of peptide mediated delivery” Trends Pharmacol Sci 2010; 31: 528-35; Samoylova T. I., et al., “Elucidation of muscle-binding peptides by phage display screening” Muscle Nerve 1999; 22: 460-6; U.S. Pat. No. 6,329,501, issued on Dec. 11, 2001, entitled “METHODS AND COMPOSITIONS FOR TARGETING COMPOUNDS TO MUSCLE”; and Samoylov A. M., et al., “Recognition of cell-specific binding of phage display derived peptides using an acoustic wave sensor.” Biomol Eng 2002; 18: 269-72; the entire contents of each of which are incorporated herein by reference. By designing peptides to interact with specific cell surface antigens (e.g., receptors), selectivity for a desired tissue, e.g., muscle, can be achieved. Skeletal muscle-targeting has been investigated and a range of molecular payloads are able to be delivered. These approaches may have high selectivity for muscle tissue without many of the practical disadvantages of a large antibody or viral particle. Accordingly, in some embodiments, the muscle-targeting agent is a muscle-targeting peptide that is from 4 to 50 amino acids in length. In some embodiments, the muscle-targeting peptide is 4, 5, 6, 7, 8, 9, 10, 11, 12, 13, 14, 15, 16, 17, 18, 19, 20, 21, 22, 23, 24, 25, 26, 27, 28, 29, 30, 31, 32, 33, 34, 35, 36, 37, 38, 39, 40, 41, 42, 43, 44, 45, 46, 47, 48, 49, or 50 amino acids in length. Muscle-targeting peptides can be generated using any of several methods, such as phage display.

[0206] In some embodiments, a muscle-targeting peptide may bind to an internalizing cell surface receptor that is overexpressed or relatively highly expressed in muscle cells, e.g. a transferrin receptor, compared with certain other cells. In some embodiments, a muscle-targeting peptide may target, e.g., bind to, a transferrin receptor. In some embodiments, a peptide that targets a transferrin receptor may comprise a segment of a naturally occurring ligand, e.g., transferrin. In some embodiments, a peptide that targets a transferrin receptor is as described in U.S. Pat. No. 6,743,893, filed Nov. 30, 2000, “RECEPTOR-MEDIATED UPTAKE OF PEPTIDES THAT BIND THE HUMAN TRANSFERRIN RECEPTOR”. In some embodiments, a peptide that targets a transferrin receptor is as described in Kawamoto, M. et al, “A novel transferrin receptor-targeted hybrid peptide disintegrates cancer cell membrane to induce rapid killing of cancer cells.” BMC Cancer. 2011 Aug. 18; 11:359. In some embodiments, a peptide that targets a transferrin receptor is as described in U.S. Pat. No. 8,399,653, filed May 20, 2011, “TRANSFERRIN/TRANSFERRIN RECEPTOR-MEDIATED SIRNA DELIVERY”.

[0207] As discussed above, examples of muscle targeting peptides have been reported. For example, muscle-specific peptides were identified using phage display library presenting surface heptapeptides. As one example a peptide having the amino acid sequence ASSLNIA (SEQ ID NO: 3071) bound to C2C12 murine myotubes in vitro, and bound to mouse muscle tissue in vivo. Accordingly, in some embodiments, the muscle-targeting agent comprises the amino acid sequence ASSLNIA (SEQ ID NO: 3071). This peptide displayed improved specificity for binding to heart and skeletal muscle tissue after intravenous injection in mice with reduced binding to liver, kidney, and brain. Additional muscle-specific peptides have been identified using phage display. For example, a 12 amino acid peptide was identified by phage display library for muscle targeting in the context of treatment for DMD. See, Yoshida D., et al., “Targeting of salicylate to skin and muscle following topical injections in rats.” Int J Pharm 2002; 231: 177-84; the entire contents of which are hereby incorporated by reference. Here, a 12 amino acid peptide having the sequence SKTFNTHPQSTP (SEQ ID NO: 3072) was identified and this muscle-targeting peptide showed improved binding to C2C12 cells relative to the ASSLNIA (SEQ ID NO: 3071) peptide.

[0208] An additional method for identifying peptides selective for muscle (e.g., skeletal muscle) over other cell types includes in vitro selection, which has been described in Ghosh D., et al., “Selection of muscle-binding peptides from context-specific peptide-presenting phage libraries for adenoviral vector targeting” J Virol 2005; 79: 13667-72; the entire contents of which are incorporated herein by reference. By pre-incubating a random 12-mer peptide phage display library with a mixture of non-muscle cell types, non-specific cell binders were selected out. Following rounds of selection the 12 amino acid peptide TARGEHKEEELI (SEQ ID NO: 3073) appeared most frequently. Accordingly, in some embodiments, the muscle-targeting agent comprises the amino acid sequence TARGEHKEEELI (SEQ ID NO: 3073).

[0209] A muscle-targeting agent may an amino acid-containing molecule or peptide. A muscle-targeting peptide may correspond to a sequence of a protein that preferentially binds to a protein receptor found in muscle cells. In some embodiments, a muscle-targeting peptide contains a high propensity of hydrophobic amino acids, e.g. valine, such that the peptide preferentially targets muscle cells. In some embodiments, a muscle-targeting peptide has not been previously characterized or disclosed. These peptides may be conceived of, produced, synthesized, and/or (e.g., and) derivatized using any of several methodologies, e.g. phage displayed peptide libraries, one-bead one-compound peptide libraries, or positional scanning synthetic peptide combinatorial libraries. Exemplary methodologies have been characterized in the art and are incorporated by reference (Gray, B. P. and Brown, K. C. “Combinatorial Peptide Libraries: Mining for Cell-Binding Peptides” Chem Rev. 2014, 114:2, 1020-1081.; Samoylova, T. I. and Smith, B. F. “Elucidation of muscle-binding peptides by phage display screening.” Muscle Nerve, 1999, 22:4. 460-6.). In some embodiments, a muscle-targeting peptide has been previously disclosed (see, e.g. Writer M. J. et al. “Targeted gene delivery to human airway epithelial cells with synthetic vectors incorporating novel targeting peptides selected by phage display.” J. Drug Targeting. 2004; 12:185; Cai, D. “BDNF-mediated enhancement of inflammation and injury in the aging heart.” Physiol Genomics. 2006, 24:3, 191-7.; Zhang, L. “Molecular profiling of heart endothelial cells.” Circulation, 2005, 112:11, 1601-11.; McGuire, M. J. et al. “In vitro selection of a peptide with high selectivity for cardiomyocytes in vivo.” J Mol Biol. 2004, 342:1, 171-82.). Exemplary muscle-targeting peptides comprise an amino acid sequence of the following group: CQAQGQLVC (SEQ ID NO: 3074), CSERSMNFC (SEQ ID NO: 3075), CPKTRRVPC (SEQ ID NO: 130), WLSEAGPVVTVRALRGTGSW (SEQ ID NO: 3076), ASSLNIA (SEQ ID NO: 3071), CMQHSMRVC (SEQ ID NO: 3077), and DDTRHWG (SEQ ID NO: 131). In some embodiments, a muscle-targeting peptide may comprise about 2-25 amino acids, about 2-20 amino acids, about 2-15 amino acids, about 2-10 amino acids, or about 2-5 amino acids. Muscle-targeting peptides may comprise naturally-occurring amino acids, e.g. cysteine, alanine, or non-naturally-occurring or modified amino acids. Non-naturally occurring amino acids include 3-amino acids, homo-amino acids, proline derivatives, 3-substituted alanine derivatives, linear core amino acids, N-methyl amino acids, and others known in the art. In some embodiments, a muscle-targeting peptide may be linear; in other embodiments, a muscle-targeting peptide may be cyclic, e.g. bicyclic (see, e.g. Silvana, M. G. et al. Mol. Therapy, 2018, 26:1, 132-147.).

[0210] iii. Muscle-Targeting Receptor Ligands

[0211] A muscle-targeting agent may be a ligand, e.g. a ligand that binds to a receptor protein. A muscle-targeting ligand may be a protein, e.g. transferrin, which binds to an internalizing cell surface receptor expressed by a muscle cell. Accordingly, in some embodiments, the muscle-targeting agent is transferrin, or a derivative thereof that binds to a transferrin receptor. A muscle-targeting ligand may alternatively be a small molecule, e.g. a lipophilic small molecule that preferentially targets muscle cells relative to other cell types. Exemplary lipophilic small molecules that may target muscle cells include compounds comprising cholesterol, cholesteryl, stearic acid, palmitic acid, oleic acid, oleyl, linolene, linoleic acid, myristic acid, sterols, dihydrotestosterone, testosterone derivatives, glycerine, alkyl chains, trityl groups, and alkoxy acids.

[0212] iv. Muscle-Targeting Aptamers

[0213] A muscle-targeting agent may be an aptamer, e.g. an RNA aptamer, which preferentially targets muscle cells relative to other cell types. In some embodiments, a muscle-targeting aptamer has not been previously characterized or disclosed. These aptamers may be conceived of, produced, synthesized, and/or (e.g., and) derivatized using any of several methodologies, e.g. Systematic Evolution of Ligands by Exponential Enrichment. Exemplary methodologies have been characterized in the art and are incorporated by reference (Yan, A. C. and Levy, M. “Aptamers and aptamer targeted delivery” RNA biology, 2009, 6:3, 316-20.; Germer, K. et al. “RNA aptamers and their therapeutic and diagnostic applications.” Int. J. Biochem. Mol. Biol. 2013; 4: 27-40.). In some embodiments, a muscle-targeting aptamer has been previously disclosed (see, e.g. Phillippou, S. et al. “Selection and Identification of Skeletal-Muscle-Targeted RNA Aptamers.” Mol Ther Nucleic Acids. 2018, 10:199-214.; Thiel, W. H. et al. “Smooth Muscle Cell-targeted RNA Aptamer Inhibits Neointimal Formation.” Mol Ther. 2016, 24:4, 779-87.). Exemplary muscle-targeting aptamers include the A01B RNA aptamer and RNA Apt 14. In some embodiments, an aptamer is a nucleic acid-based aptamer, an oligonucleotide aptamer or a peptide aptamer. In some embodiments, an aptamer may be about 5-15 kDa, about 5-10 kDa, about 10-15 kDa, about 1-5 Da, about 1-3 kDa, or smaller.

[0214] v. Other Muscle-Targeting Agents

[0215] One strategy for targeting a muscle cell (e.g., a skeletal muscle cell) is to use a substrate of a muscle transporter protein, such as a transporter protein expressed on the sarcolemma. In some embodiments, the muscle-targeting agent is a substrate of an influx transporter that is specific to muscle tissue. In some embodiments, the influx transporter is specific to skeletal muscle tissue. Two main classes of transporters are expressed on the skeletal muscle sarcolemma, (1) the adenosine triphosphate (ATP) binding cassette (ABC) superfamily, which facilitate efflux from skeletal muscle tissue and (2) the solute carrier (SLC) superfamily, which can facilitate the influx of substrates into skeletal muscle. In some embodiments, the muscle-targeting agent is a substrate that binds to an ABC superfamily or an SLC superfamily of transporters. In some embodiments, the substrate that binds to the ABC or SLC superfamily of transporters is a naturally-occurring substrate. In some embodiments, the substrate that binds to the ABC or SLC superfamily of transporters is a non-naturally occurring substrate, for example, a synthetic derivative thereof that binds to the ABC or SLC superfamily of transporters.

[0216] In some embodiments, the muscle-targeting agent is any muscle targeting agent described herein (e.g., antibodies, nucleic acids, small molecules, peptides, aptamers, lipids, sugar moieties) that target SLC superfamily of transporters. In some embodiments, the muscle-targeting agent is a substrate of an SLC superfamily of transporters. SLC transporters are either equilibrative or use proton or sodium ion gradients created across the membrane to drive transport of substrates. Exemplary SLC transporters that have high skeletal muscle expression include, without limitation, the SATT transporter (ASCT1; SLC1A4), GLUT4 transporter (SLC2A4), GLUT7 transporter (GLUT7; SLC2A7), ATRC2 transporter (CAT-2; SLC7A2), LAT3 transporter (KIAA0245; SLC7A6), PHT1 transporter (PTR4; SLC15A4), OATP-J transporter (OATP5A1; SLC21A15), OCT3 transporter (EMT; SLC22A3), OCTN2 transporter (FLJ46769; SLC22A5), ENT transporters (ENT1; SLC29A1 and ENT2; SLC29A2), PAT2 transporter (SLC36A2), and SAT2 transporter (KIAA1382; SLC38A2). These transporters can facilitate the influx of substrates into skeletal muscle, providing opportunities for muscle targeting.

[0217] In some embodiments, the muscle-targeting agent is a substrate of an equilibrative nucleoside transporter 2 (ENT2) transporter. Relative to other transporters, ENT2 has one of the highest mRNA expressions in skeletal muscle. While human ENT2 (hENT2) is expressed in most body organs such as brain, heart, placenta, thymus, pancreas, prostate, and kidney, it is especially abundant in skeletal muscle. Human ENT2 facilitates the uptake of its substrates depending on their concentration gradient. ENT2 plays a role in maintaining nucleoside homeostasis by transporting a wide range of purine and pyrimidine nucleobases. The hENT2 transporter has a low affinity for all nucleosides (adenosine, guanosine, uridine, thymidine, and cytidine) except for inosine. Accordingly, in some embodiments, the muscle-targeting agent is an ENT2 substrate. Exemplary ENT2 substrates include, without limitation, inosine, 2′,3′-dideoxyinosine, and calofarabine. In some embodiments, any of the muscle-targeting agents provided herein are associated with a molecular payload (e.g., oligonucleotide payload). In some embodiments, the muscle-targeting agent is covalently linked to the molecular payload. In some embodiments, the muscle-targeting agent is non-covalently linked to the molecular payload.

[0218] In some embodiments, the muscle-targeting agent is a substrate of an organic cation/carnitine transporter (OCTN2), which is a sodium ion-dependent, high affinity carnitine transporter. In some embodiments, the muscle-targeting agent is carnitine, mildronate, acetylcarnitine, or any derivative thereof that binds to OCTN2. In some embodiments, the carnitine, mildronate, acetylcarnitine, or derivative thereof is covalently linked to the molecular payload (e.g., oligonucleotide payload).

[0219] A muscle-targeting agent may be a protein that is protein that exists in at least one soluble form that targets muscle cells. In some embodiments, a muscle-targeting protein may be hemojuvelin (also known as repulsive guidance molecule C or hemochromatosis type 2 protein), a protein involved in iron overload and homeostasis. In some embodiments, hemojuvelin may be full length or a fragment, or a mutant with at least 75%, at least 80%, at least 85%, at least 90%, at least 95%, at least 98% or at least 99% sequence identity to a functional hemojuvelin protein. In some embodiments, a hemojuvelin mutant may be a soluble fragment, may lack a N-terminal signaling, and/or (e.g., and) lack a C-terminal anchoring domain. In some embodiments, hemojuvelin may be annotated under GenBank RefSeq Accession Numbers NM_001316767.1, NM 145277.4, NM_202004.3, NM_213652.3, or NM_213653.3. It should be appreciated that a hemojuvelin may be of human, non-human primate, or rodent origin.

[0220] B. Molecular Payloads

[0221] Some aspects of the disclosure provide molecular payloads, e.g., oligonucleotides designed to target DUX4 RNAs to modulate the expression or the activity of DUX4. In some embodiments, the disclosure provides oligonucleotides complementary with DUX4 RNA that are useful for reducing levels of DUX4 mRNA and/or protein associated with features of facioscapulohumeral muscular dystrophy (FSHD) pathology, including muscle atrophy, inflammation, and decreased differentiation potential and oxidative stress. In some embodiments, the oligonucleotides provided herein are designed to direct RNAi mediated degradation of DUX4 RNA. In some embodiments, the oligonucleotides are designed to efficiently engage the RNA-induced silencing complex (RISC) for degradation of the DUX4 RNA but also have reduced off-target effect. In some embodiments, the oligonucleotides are designed to have desirable bioavailability and/or serum-stability properties. In some embodiments, the oligonucleotides are designed to have desirable binding affinity properties. In some embodiments, the oligonucleotides are designed to have desirable toxicity and/or immunogenicity profiles.

[0222] In some embodiments, the DUX4-targeting oligonucleotide comprises a strand having a region of complementarity to a DUX4 RNA. Exemplary oligonucleotides are described in further detail herein, however, it should be appreciated that the exemplary oligonucleotides provided herein are not meant to be limiting.

[0223] i. Oligonucleotides

[0224] In some embodiments, the DUX4-targeting oligonucleotides provided herein are designed to cause RNAi mediated degradation of DUX4 mRNA. In some embodiments, the DUX4-targeting oligonucleotide provided herein comprises an antisense strand that is complementary to a DUX4 mRNA. In some embodiments, the oligonucleotide provided herein further comprises a sense strand that forms a double-stranded oligonucleotide (e.g., siRNA). It should be appreciated that, in some embodiments, oligonucleotides in one format (e.g., antisense oligonucleotides) may be suitably adapted to another format (e.g., siRNA oligonucleotides) by incorporating functional sequences (e.g., antisense strand sequences) from one format to the other format.

[0225] Any suitable oligonucleotide may be used as a molecular payload, as described herein. Examples of oligonucleotides useful for targeting DUX4 are provided in U.S. Pat. No. 9,988,628, published on Feb. 2, 2017, entitled “AGENTS USEFUL IN TREATING FACIOSCAPULOHUMERAL MUSCULAR DYSTROPHY”; U.S. Pat. No. 9,469,851, published Oct. 30, 2014, entitled “RECOMBINANT VIRUS PRODUCTS AND METHODS FOR INHIBITING EXPRESSION OF DUX4”; US Patent Application Publication 20120225034, published on Sep. 6, 2012, entitled “AGENTS USEFUL IN TREATING FACIOSCAPULOHUMERAL MUSCULAR DYSTROPHY”; PCT Patent Application Publication Number WO 2013/120038, published on Aug. 15, 2013, entitled “MORPHOLINO TARGETING DUX4 FOR TREATING FSHD”; Chen et al., “Morpholino-mediated Knockdown of DUX4 Toward Facioscapulohumeral Muscular Dystrophy Therapeutics,” Molecular Therapy, 2016, 24:8, 1405-1411.; and Ansseau et al., “Antisense Oligonucleotides Used to Target the DUX4 mRNA as Therapeutic Approaches in Facioscapulohumeral Muscular Dystrophy (FSHD),” Genes, 2017, 8, 93; the contents of each of which are incorporated herein in their entireties. In some embodiments, the oligonucleotide is an antisense oligonucleotide, a morpholino, a siRNA, a shRNA, or another oligonucleotide which hybridizes with the target DUX4 gene or mRNA.

[0226] In some embodiments, the oligonucleotides described herein have a region of complementarity to a sequence as set forth as: Human DUX4, corresponding to NCBI sequence NM_001293798.2 (SEQ ID NO: 160) or NCBI Sequence: NM_001306068.3 (SEQ ID NO: 161) as below and/or (e.g., and) Mouse DUX4, corresponding to NCBI sequence NM_001081954.1 (SEQ ID NO: 162), as below. Other non-limiting exemplary human DUX4 mRNA include NCBI Sequence: NM_033178, GenBank accession numbers FJ439133, AF117653, HM101229, HM101230, HM101232, HM101233, HM101234, HM101235, HM101240, HM101241, HM101242, HM101243, HM101244, HM101245, HM101246, HM101247, HM101248, HM101249, HM101250, HM101251 and HM190160, HM190161, HM190162, HM190163, HM190164, HM190165, HM190166, HM190167, HM190168, HM190169, HM190170, HM190171, HM190172, HM190173, HM190174, HM190175, HM190176, HM190177, HM190178, HM190179, HM190180, HM190181, HM190182, HM190183, HM190184, HM190185, HM190186, HM190187, HM190188, HM190189, HM190190, HM190191, HM190192, HM190193, HM190194, HM190195, HM190196, each of which is incorporated herein by reference. In some embodiments, the oligonucleotide may have a region of complementarity to a hypomethylated, contracted D4Z4 repeat, as in Daxinger, et al., “Genetic and Epigenetic Contributors to FSHD,” published in Curr Opin Genet Dev in 2015, Lim J-W, et al., DICER/AGO-dependent epigenetic silencing of D4Z4 repeats enhanced by exogenous siRNA suggests mechanisms and therapies for FSHD Hum Mol Genet. 2015 Sep. 1; 24(17): 4817-4828, the contents of each of which are incorporated in their entireties.

[0227] In some embodiments, oligonucleotides may have a region of complementarity to a sequence set forth as follows, which is an example human DUX4 gene sequence (NM_001293798.2) (SEQ ID NO: 160):

ATGGCCCTCCCGACACCCTCGGACAGCACCCTCCCCGCGG
AAGCCCGGGGACGAGGACGGCGACGGAGACTCGTTTGGAC
CCCGAGCCAAAGCGAGGCCCTGCGAGCCTGCTTTGAGCGG
AACCCGTACCCGGGCATCGCCACCAGAGAACGGCTGGCCC
AGGCCATCGGCATTCCGGAGCCCAGGGTCCAGATTTGGTT
TCAGAATGAGAGGTCACGCCAGCTGAGGCAGCACCGGCGG
GAATCTCGGCCCTGGCCCGGGAGACGCGGCCCGCCAGAAG
GCCGGCGAAAGCGGACCGCCGTCACCGGATCCCAGACCGC
CCTGCTCCTCCGAGCCTTTGAGAAGGATCGCTTTCCAGGC
ATCGCCGCCCGGGAGGAGCTGGCCAGAGAGACGGGCCTCC
CGGAGTCCAGGATTCAGATCTGGTTTCAGAATCGAAGGGC
CAGGCACCCGGGACAGGGTGGCAGGGCGCCCGCGCAGGCA
GGCGGCCTGTGCAGCGCGGCCCCCGGCGGGGGTCACCCTG
CTCCCTCGTGGGTCGCCTTCGCCCACACCGGCGCGTGGGG
AACGGGGCTTCCCGCACCCCACGTGCCCTGCGCGCCTGGG
GCTCTCCCACAGGGGGCTTTCGTGAGCCAGGCAGCGAGGG
CCGCCCCCGCGCTGCAGCCCAGCCAGGCCGCGCCGGCAGA
GGGGATCTCCCAACCTGCCCCGGCGCGCGGGGATTTCGCC
TACGCCGCCCCGGCTCCTCCGGACGGGGCGCTCTCCCACC
CTCAGGCTCCTCGCTGGCCTCCGCACCCGGGCAAAAGCCG
GGAGGACCGGGACCCGCAGCGCGACGGCCTGCCGGGCCCC
TGCGCGGTGGCACAGCCTGGGCCCGCTCAAGCGGGGCCGC
AGGGCCAAGGGGTGCTTGCGCCACCCACGTCCCAGGGGAG
TCCGTGGTGGGGCTGGGGCCGGGGTCCCCAGGTCGCCGGG
GCGGCGTGGGAACCCCAAGCCGGGGCAGCTCCACCTCCCC
AGCCCGCGCCCCCGGACGCCTCCGCCTCCGCGCGGCAGGG
GCAGATGCAAGGCATCCCGGCGCCCTCCCAGGCGCTCCAG
GAGCCGGCGCCCTGGTCTGCACTCCCCTGCGGCCTGCTGC
TGGATGAGCTCCTGGCGAGCCCGGAGTTTCTGCAGCAGGC
GCAACCTCTCCTAGAAACGGAGGCCCCGGGGGAGCTGGAG
GCCTCGGAAGAGGCCGCCTCGCTGGAAGCACCCCTCAGCG
AGGAAGAATACCGGGCTCTGCTGGAGGAGCTTTAGGACGC
GGGGTCTAGGCCCGGTGAGAGACTCCACACCGCGGAGAAC
TGCCATTCTTTCCTGGGCATCCCGGGGATCCCAGAGCCGG
CCCAGGTACCAGCAGACCTGCGCGCAGTGCGCACCCCGGC
TGACGTGCAAGGGAGCTCGCTGGCCTCTCTGTGCCCTTGT
TCTTCCGTGAAATTCTGGCTGAATGTCTCCCCCCACCTTC
CGACGCTGTCTAGGCAAACCTGGATTAGAGTTACATCTCC
TGGATGATTAGTTCAGAGATATATTAAAATGCCCCCTCCC
TGTGGATCCTATAG

[0228] In some embodiments, oligonucleotides may have a region of complementarity to a sequence set forth as follows, which is an example human DUX4 gene sequence (NM_001306068.3) (SEQ ID NO: 161):

ATGGCCCTCCCGACACCCTCGGACAGCACCCTCCCCGCGG
AAGCCCGGGGACGAGGACGGCGACGGAGACTCGTTTGGAC
CCCGAGCCAAAGCGAGGCCCTGCGAGCCTGCTTTGAGCGG
AACCCGTACCCGGGCATCGCCACCAGAGAACGGCTGGCCC
AGGCCATCGGCATTCCGGAGCCCAGGGTCCAGATTTGGTT
TCAGAATGAGAGGTCACGCCAGCTGAGGCAGCACCGGCGG
GAATCTCGGCCCTGGCCCGGGAGACGCGGCCCGCCAGAAG
GCCGGCGAAAGCGGACCGCCGTCACCGGATCCCAGACCGC
CCTGCTCCTCCGAGCCTTTGAGAAGGATCGCTTTCCAGGC
ATCGCCGCCCGGGAGGAGCTGGCCAGAGAGACGGGCCTCC
CGGAGTCCAGGATTCAGATCTGGTTTCAGAATCGAAGGGC
CAGGCACCCGGGACAGGGTGGCAGGGCGCCCGCGCAGGCA
GGCGGCCTGTGCAGCGCGGCCCCCGGCGGGGGTCACCCTG
CTCCCTCGTGGGTCGCCTTCGCCCACACCGGCGCGTGGGG
AACGGGGCTTCCCGCACCCCACGTGCCCTGCGCGCCTGGG
GCTCTCCCACAGGGGGCTTTCGTGAGCCAGGCAGCGAGGG
CCGCCCCCGCGCTGCAGCCCAGCCAGGCCGCGCCGGCAGA
GGGGATCTCCCAACCTGCCCCGGCGCGCGGGGATTTCGCC
TACGCCGCCCCGGCTCCTCCGGACGGGGCGCTCTCCCACC
CTCAGGCTCCTCGGTGGCCTCCGCACCCGGGCAAAAGCCG
GGAGGACCGGGACCCGCAGCGCGACGGCCTGCCGGGCCCC
TGCGCGGTGGCACAGCCTGGGCCCGCTCAAGCGGGGCCGC
AGGGCCAAGGGGTGCTTGCGCCACCCACGTCCCAGGGGAG
TCCGTGGTGGGGCTGGGGCCGGGGTCCCCAGGTCGCCGGG
GCGGCGTGGGAACCCCAAGCCGGGGCAGCTCCACCTCCCC
AGCCCGCGCCCCCGGACGCCTCCGCCTCCGCGCGGCAGGG
GCAGATGCAAGGCATCCCGGCGCCCTCCCAGGCGCTCCAG
GAGCCGGCGCCCTGGTCTGCACTCCCCTGCGGCCTGCTGC
TGGATGAGCTCCTGGCGAGCCCGGAGTTTCTGCAGCAGGC
GCAACCTCTCCTAGAAACGGAGGCCCCGGGGGAGCTGGAG
GCCTCGGAAGAGGCCGCCTCGCTGGAAGCACCCCTCAGCG
AGGAAGAATACCGGGCTCTGCTGGAGGAGCTTTAGGACGC
GGGGTTGGGACGGGGTCGGGTGGTTCGGGGCAGGGCGGTG
GCCTCTCTTTCGCGGGGAACACCTGGCTGGCTACGGAGGG
GCGTGTCTCCGCCCCGCCCCCTCCACCGGGCTGACCGGCC
TGGGATTCCTGCCTTCTAGGTCTAGGCCCGGTGAGAGACT
CCACTCCGCGGAGAACTGCCTTTCTTTCCTGGGCATCCCG
GGGATCCCAGAGCCGGCCCAGGTACCAGCAGACCTGCGCG
CAGTGCGCACCCCGGCTGACGTGCAAGGGAGCTCGCTGGC
CTCTCTGTGCCCTTGTTCTTCCGTGAAATTCTGGCTGAAT
GTCTCCCCCCACCTTCCGACGCTGTCTAGGCAAACCTGGA
TTAGAGTTACATCTCCTGGATGATTAGTTCAGAGATATAT
TAAAATGCCCCCTCCCTGTGGATCCTATAG.

[0229] In some embodiments, oligonucleotides may have a region of complementarity to a sequence set forth as follows, which is an example mouse DUX4 gene sequence (SEQ ID NO: 162) (NM_001081954.1):

ATGGCAGAAGCTGGCAGCCCTGTTGGTGGCAGTGGTGTGG
CACGGGAATCCCGGCGGCGCAGGAAGACGGTTTGGCAGGC
CTGGCAAGAGCAGGCCCTGCTATCAACTTTCAAGAAGAAG
AGATACCTGAGCTTCAAGGAGAGGAAGGAGCTGGCCAAGC
GAATGGGGGTCTCAGATTGCCGCATCCGCGTGTGGTTTCA
GAACCGCAGGAATCGCAGTGGAGAGGAGGGGCATGCCTCA
AAGAGGTCCATCAGAGGCTCCAGGCGGCTAGCCTCGCCAC
AGCTCCAGGAAGAGCTTGGATCCAGGCCACAGGGTAGAGG
CATGCGCTCATCTGGCAGAAGGCCTCGCACTCGACTCACC
TCGCTACAGCTCAGGATCCTAGGGCAAGCCTTTGAGAGGA
ACCCACGACCAGGCTTTGCTACCAGGGAGGAGCTGGCGCG
TGACACAGGGTTGCCCGAGGACACGATCCACATATGGTTT
CAAAACCGAAGAGCTCGGCGGCGCCACAGGAGGGGCAGGC
CCACAGCTCAAGATCAAGACTTGCTGGCGTCACAAGGGTC
GGATGGGGCCCCTGCAGGTCCGGAAGGCAGAGAGCGTGAA
GGTGCCCAGGAGAACTTGTTGCCACAGGAAGAAGCAGGAA
GTACGGGCATGGATACCTCGAGCCCTAGCGACTTGCCCTC
CTTCTGCGGAGAGTCCCAGCCTTTCCAAGTGGCACAGCCC
CGTGGAGCAGGCCAACAAGAGGCCCCCACTCGAGCAGGCA
ACGCAGGCTCTCTGGAACCCCTCCTTGATCAGCTGCTGGA
TGAAGTCCAAGTAGAAGAGCCTGCTCCAGCCCCTCTGAAT
TTGGATGGAGACCCTGGTGGCAGGGTGCATGAAGGTTCCC
AGGAGAGCTTTTGGCCACAGGAAGAAGCAGGAAGTACAGG
CATGGATACTTCTAGCCCCAGCGACTCAAACTCCTTCTGC
AGAGAGTCCCAGCCTTCCCAAGTGGCACAGCCCTGTGGAG
CGGGCCAAGAAGATGCCCGCACTCAAGCAGACAGCACAGG
CCCTCTGGAACTCCTCCTCCTTGATCAACTGCTGGACGAA
GTCCAAAAGGAAGAGCATGTGCCAGTCCCACTGGATTGGG
GTAGAAATCCTGGCAGCAGGGAGCATGAAGGTTCCCAGGA
CAGCTTACTGCCCCTGGAGGAAGCAGTAAATTCGGGCATG
GATACCTCGATCCCTAGCATCTGGCCAACCTTCTGCAGAG
AATCCCAGCCTCCCCAAGTGGCACAGCCCTCTGGACCAGG
CCAAGCACAGGCCCCCACTCAAGGTGGGAACACGGACCCC
CTGGAGCTCTTCCTCTATCAACTGTTGGATGAAGTCCAAG
TAGAAGAGCATGCTCCAGCCCCTCTGAATTGGGATGTAGA
TCCTGGTGGCAGGGTGCATGAAGGTTCGTGGGAGAGCTTT
TGGCCACAGGAAGAAGCAGGAAGTACAGGCCTGGATACTT
CAAGCCCCAGCGACTCAAACTCCTTCTTCAGAGAGTCCAA
GCCTTCCCAAGTGGCACAGCGCCGTGGAGCGGGCCAAGAA
GATGCCCGCACTCAAGCAGACAGCACAGGCCCTCTGGAAC
TCCTCCTCTTTGATCAACTGCTGGACGAAGTCCAAAAGGA
AGAGCATGTGCCAGCCCCACTGGATTGGGGTAGAAATCCT
GGCAGCATGGAGCATGAAGGTTCCCAGGACAGCTTACTGC
CCCTGGAGGAAGCAGCAAATTCGGGCAGGGATACCTCGAT
CCCTAGCATCTGGCCAGCCTTCTGCAGAAAATCCCAGCCT
CCCCAAGTGGCACAGCCCTCTGGACCAGGCCAAGCACAGG
CCCCCATTCAAGGTGGGAACACGGACCCCCTGGAGCTCTT
CCTTGATCAACTGCTGACCGAAGTCCAACTTGAGGAGCAG
GGGCCTGCCCCTGTGAATGTGGAGGAAACATGGGAGCAAA
TGGACACAACACCTATCTGCCTCTCACTTCAGAAGAATAT
CAGACTCTTCTAGATATGCTCTGA.

[0230] In some embodiments, an oligonucleotide may have a region of complementarity to DUX4 gene sequences of multiple species, e.g., selected from human, mouse and non-human species. In some embodiments, the non-human species is a cynomolgus monkey.

[0231] ii. Oligonucleotide Size/Sequence

[0232] Oligonucleotides may be of a variety of different lengths, e.g., depending on the format. In some embodiments, an oligonucleotide is 7, 8, 9, 10, 11, 12, 13, 14, 15, 16, 17, 18, 19, 20, 21, 22, 23, 24, 25, 26, 27, 28, 29, 30, 35, 40, 45, 50, 75, or more nucleotides in length. In some embodiments, the oligonucleotide is 8 to 50 nucleotides in length, 8 to 40 nucleotides in length, 8 to 32 nucleotides in length, 10 to 15 nucleotides in length, 10 to 20 nucleotides in length, 15 to 25 nucleotides in length, 21 to 23 nucleotides in lengths, etc. In some embodiments, the oligonucleotide is 8 to 32 nucleotides, 15 to 29 nucleotides, 15 to 27 nucleotides, 15 to 20 nucleotides, 20 to 25 nucleotides, 21 to 27 nucleotides, 23 to 27 nucleotides, 25 to 30 nucleotides, or 25-32 nucleotides in length.

[0233] In some embodiments, a complementary nucleic acid sequence of an oligonucleotide for purposes of the present disclosure is specifically hybridizable or specific for the target nucleic acid when binding of the sequence to the target molecule (e.g., mRNA) interferes with the normal function of the target (e.g., mRNA) to cause a loss of activity (e.g., inhibiting translation) or expression (e.g., degrading a target mRNA) and there is a sufficient degree of complementarity to avoid non-specific binding of the sequence to non-target sequences under conditions in which avoidance of non-specific binding is desired, e.g., under physiological conditions in the case of in vivo assays or therapeutic treatment, and in the case of in vitro assays, under conditions in which the assays are performed under suitable conditions of stringency. Thus, in some embodiments, an oligonucleotide may be at least 80%, at least 85%, at least 90%, at least 91%, at least 92%, at least 93%, at least 94%, at least 95%, at least 96%, at least 97%, at least 98%, at least 99% or 100% complementary to the consecutive nucleotides of a target nucleic acid. In some embodiments a complementary nucleotide sequence need not be 100% complementary to that of its target to be specifically hybridizable or specific for a target nucleic acid. In some embodiments, oligonucleotides comprise one or more mismatched nucleobases relative to the target nucleic acid. In some embodiments, activity relating to the target is reduced by such mismatch, but activity relating to a non-target is reduced by a greater amount (i.e., selectivity for the target nucleic acid is increased and off-target effects are decreased). In some embodiments, the target nucleic acid is a pre-mRNA molecule or an mRNA molecule.

[0234] In some embodiments, an oligonucleotide comprises region of complementarity to a target nucleic acid that is in the range of 8 to 15, 8 to 30, 8 to 40, or 10 to 50, or 5 to 50, or 5 to 40 nucleotides in length. In some embodiments, an oligonucleotide comprises region of complementarity to a target nucleic acid that is in the range of 8-32, 15-29, 15-27, 21-27, 23-27 nucleotides in length. In some embodiments, an oligonucleotide comprises a region of complementarity to a target nucleic acid that is in the range of 15-29, 15-27, 15 to 20, 20 to 25, 21-27, 23-27, 25-27, or 25-32 nucleotides in length. In some embodiments, a region of complementarity of an oligonucleotide to a target nucleic acid is 5, 6, 7, 8, 9, 10, 11, 12, 13, 14, 15, 16, 17, 18, 19, 20, 21, 22, 23, 24, 25, 26, 27, 28, 29, 30, 31, 32, 33, 34, 35, 36, 37, 38, 39, 40, 41, 42, 43, 44, 45, 46, 47, 48, 49, or 50 nucleotides in length. In some embodiments, the region of complementarity is complementary with at least 8 consecutive nucleotides of a target nucleic acid. In some embodiments, an oligonucleotide may contain 1, 2 or 3 base mismatches compared to the portion of the consecutive nucleotides of target nucleic acid. In some embodiments the oligonucleotide may have up to 3 mismatches over 15 bases, or up to 2 mismatches over 10 bases.

[0235] In some embodiments, an oligonucleotide comprises at least 10, 11, 12, 13, 14, 15, 16, 17, 18, 19, or 20 consecutive nucleotides of a sequence comprising any one of SEQ ID NOs: 1575-2986 and 3027-3066. In some embodiments, an oligonucleotide comprises a sequence comprising any one of SEQ ID NOs: 1575-2986 and 3027-3066. In some embodiments, an oligonucleotide comprises a sequence that shares at least 70%, 75%, 80%, 85%, 90%, 95%, or 97% sequence identity with at least 12 or at least 15 consecutive nucleotides of any one of SEQ ID NOs: 1575-2986 and 3027-3066. In some embodiments, an oligonucleotide comprises at least 10, 11, 12, 13, 14, 15, 16, 17, 18, 19, or 20 consecutive nucleotides of a sequence comprising any one of SEQ ID NOs: 3027-3066. In some embodiments, an oligonucleotide comprises a sequence comprising any one of SEQ ID NOs: 3027-3066. In some embodiments, an oligonucleotide comprises a sequence that shares at least 70%, 75%, 80%, 85%, 90%, 95%, or 97% sequence identity with at least 12 or at least 15 consecutive nucleotides of any one of SEQ ID NOs: 3027-3066.

[0236] In some embodiments, an oligonucleotide comprises a region of complementarity to a target sequence as set forth in any one of SEQ ID NO: 163-1574. In some embodiments, an oligonucleotide comprises a region of complementarity to a target sequence as set forth in any one of SEQ ID NO: 2987-3026. In some embodiments, an oligonucleotide comprises region of complementarity that is at least 70%, 75%, 80%, 85%, 90%, 95%, 97%; 99%, or 100% complementary with at least 12 or at least 15 consecutive nucleotides of a target sequence as set forth of any one of SEQ ID NO: 163-1574. In some embodiments, an oligonucleotide comprises region of complementarity that is at least 70%, 75%, 80%, 85%, 90%, 95%, 97%; 99%, or 100% complementary with at least 12 or at least 15 consecutive nucleotides of a target sequence as set forth of any one of SEQ ID NO: 2987-3026. In some embodiments, the region of complementarity is at least 8, at least 9, at least 10, at least 11, at least 12, at least 13, at least 14, at least 15, at least 16, at least 17, at least 19 or at least 20 nucleotides in length. In some embodiments, the region of complementarity is 8, 9, 10, 11, 12, 13, 14, 15, 16, 17, 18, 19, or 20 nucleotides in length. In some embodiments, the region of complementarity is in the range of 8 to 20, 10 to 20 or 15 to 20 nucleotides in length. In some embodiments, the region of complementarity is fully complementary with all or a portion of its target sequence. In some embodiments, the region of complementarity includes 1, 2, 3 or more mismatches.

[0237] In some embodiments, the oligonucleotide is complementary (e.g., at least 85% at least 90%, at least 95%, or 100%) to a target sequence of any one of the oligonucleotides provided herein (e.g., the oligonucleotides listed in Table 8). In some embodiments, such target sequence is 100% complementary to the oligonucleotide listed in Table 8. In some embodiments, the oligonucleotide is complementary (e.g., at least 85% at least 90%, at least 95%, or 100%) to a target sequence of any one of the oligonucleotides provided herein (e.g., the oligonucleotides listed in Table 9). In some embodiments, such target sequence is 100% complementary to the oligonucleotide listed in Table 9. In some embodiments, the oligonucleotide is complementary (e.g., at least 85% at least 90%, at least 95%, or 100%) to a target sequence of any one of the oligonucleotides provided herein (e.g., the oligonucleotides comprising any one of SEQ ID NOs: 1575-2986 and 3027-3066). In some embodiments, such target sequence is 100% complementary to the oligonucleotide described herein (e.g., the oligonucleotides comprising any one of SEQ ID NOs: 1575-2986 and 3027-3066).

[0238] In some embodiments, it should be appreciated that methylation of the nucleobase uracil at the C5 position forms thymine. Thus, in some embodiments, a nucleotide or nucleoside having a C5 methylated uracil (or 5-methyl-uracil) may be equivalently identified as a thymine nucleotide or nucleoside.

[0239] In some embodiments, one or more of the thymine bases (T's) in any one of the oligonucleotides provided herein may independently and optionally be uracil bases (U's), and/or any one or more of the U's may independently and optionally be T's. In some embodiments, one or more of the thymine bases (T's) in any one of the oligonucleotides listed in Table 8 or Table 9 may independently and optionally be uracil bases (U's), and/or any one or more of the U's may independently and optionally be T's.

[0240] b. Oligonucleotide Modifications:

[0241] The oligonucleotides described herein may be modified, e.g., comprise a modified sugar moiety, a modified internucleoside linkage, a modified nucleotide and/or (e.g., and) combinations thereof. In addition, in some embodiments, oligonucleotides may exhibit one or more of the following properties: do not mediate alternative splicing; are not immune stimulatory; are nuclease resistant; have improved cell uptake compared to unmodified oligonucleotides; are not toxic to cells or mammals; have improved endosomal exit internally in a cell; minimizes TLR stimulation; or avoid pattern recognition receptors. Any of the modified chemistries or formats of oligonucleotides described herein can be combined with each other. For example, one, two, three, four, five, or more different types of modifications can be included within the same oligonucleotide.

[0242] In some embodiments, certain nucleotide modifications may be used that make an oligonucleotide into which they are incorporated more resistant to nuclease digestion than the native oligodeoxynucleotide or oligoribonucleotide molecules; these modified oligonucleotides survive intact for a longer time than unmodified oligonucleotides. Specific examples of modified oligonucleotides include those comprising modified backbones, for example, modified internucleoside linkages such as phosphorothioates, phosphotriesters, methyl phosphonates, short chain alkyl or cycloalkyl intersugar linkages or short chain heteroatomic or heterocyclic intersugar linkages. Accordingly, oligonucleotides of the disclosure can be stabilized against nucleolytic degradation such as by the incorporation of a modification, e.g., a nucleotide modification.

[0243] In some embodiments, an oligonucleotide may be of up to 50 or up to 100 nucleotides in length in which 2 to 10, 2 to 15, 2 to 16, 2 to 17, 2 to 18, 2 to 19, 2 to 20, 2 to 25, 2 to 30, 2 to 40, 2 to 45, or more nucleotides of the oligonucleotide are modified nucleotides. The oligonucleotide may be of 8 to 30 nucleotides in length in which 2 to 10, 2 to 15, 2 to 16, 2 to 17, 2 to 18, 2 to 19, 2 to 20, 2 to 25, 2 to 30 nucleotides of the oligonucleotide are modified nucleotides. The oligonucleotide may be of 8 to 15 nucleotides in length in which 2 to 4, 2 to 5, 2 to 6, 2 to 7, 2 to 8, 2 to 9, 2 to 10, 2 to 11, 2 to 12, 2 to 13, 2 to 14 nucleotides of the oligonucleotide are modified nucleotides. Optionally, the oligonucleotides may have every nucleotide except 1, 2, 3, 4, 5, 6, 7, 8, 9, or 10 nucleotides modified. Oligonucleotide modifications are described further herein.

[0244] c. Modified Nucleosides

[0245] In some embodiments, the oligonucleotide described herein comprises at least one nucleoside modified at the 2′ position of the sugar. In some embodiments, an oligonucleotide comprises at least one 2′-modified nucleoside. In some embodiments, all of the nucleosides in the oligonucleotide are 2′-modified nucleosides.

[0246] In some embodiments, the oligonucleotide described herein comprises one or more non-bicyclic 2′-modified nucleosides, e.g., 2′-deoxy, 2′-fluoro (2′-F), 2′-O-methyl (2′-O-Me), 2′-O-methoxyethyl (2′-MOE), 2′-O-aminopropyl (2′-O-AP), 2′-O-dimethylaminoethyl (2′-O-DMAOE), 2′-O-dimethylaminopropyl (2′-O-DMAP), 2′-O-dimethylaminoethyloxyethyl (2′-O-DMAEOE), or 2′-O—N-methylacetamido (2′-O-NMA) modified nucleoside.

[0247] In some embodiments, the oligonucleotide described herein comprises one or more 2′-4′ bicyclic nucleosides in which the ribose ring comprises a bridge moiety connecting two atoms in the ring, e.g., connecting the 2′-0 atom to the 4′-C atom via a methylene (LNA) bridge, an ethylene (ENA) bridge, or a (S)-constrained ethyl (cEt) bridge. Examples of LNAs are described in International Patent Application Publication WO/2008/043753, published on Apr. 17, 2008, and entitled “RNA Antagonist Compounds For The Modulation Of PCSK9”, the contents of which are incorporated herein by reference in its entirety. Examples of ENAs are provided in International Patent Publication No. WO 2005/042777, published on May 12, 2005, and entitled “APP ENA Antisense”; Morita et al., Nucleic Acid Res., Suppl 1:241-242, 2001; Surono et al., Hum. Gene Ther., 15:749-757, 2004; Koizumi, Curr. Opin. Mol. Ther., 8:144-149, 2006 and Horie et al., Nucleic Acids Symp. Ser (Oxf), 49:171-172, 2005; the disclosures of which are incorporated herein by reference in their entireties. Examples of cEt are provided in U.S. Pat. Nos. 7,101,993; 7,399,845 and 7,569,686, each of which is herein incorporated by reference in its entirety.

[0248] In some embodiments, the oligonucleotide comprises a modified nucleoside disclosed in one of the following United States patent or patent Application Publications: U.S. Pat. No. 7,399,845, issued on Jul. 15, 2008, and entitled “6-Modified Bicyclic Nucleic Acid Analogs”; U.S. Pat. No. 7,741,457, issued on Jun. 22, 2010, and entitled “6-Modified Bicyclic Nucleic Acid Analogs”; U.S. Pat. No. 8,022,193, issued on Sep. 20, 2011, and entitled “6-Modified Bicyclic Nucleic Acid Analogs”; U.S. Pat. No. 7,569,686, issued on Aug. 4, 2009, and entitled “Compounds And Methods For Synthesis Of Bicyclic Nucleic Acid Analogs”; U.S. Pat. No. 7,335,765, issued on Feb. 26, 2008, and entitled “Novel Nucleoside And Oligonucleotide Analogues”; U.S. Pat. No. 7,314,923, issued on Jan. 1, 2008, and entitled “Novel Nucleoside And Oligonucleotide Analogues”; U.S. Pat. No. 7,816,333, issued on Oct. 19, 2010, and entitled “Oligonucleotide Analogues And Methods Utilizing The Same” and US Publication Number 2011/0009471 now U.S. Pat. No. 8,957,201, issued on Feb. 17, 2015, and entitled “Oligonucleotide Analogues And Methods Utilizing The Same”, the entire contents of each of which are incorporated herein by reference for all purposes.

[0249] In some embodiments, the oligonucleotide comprises at least one modified nucleoside that results in an increase in Tm of the oligonucleotide in a range of 1° C., 2° C., 3° C., 4° C., or 5° C. compared with an oligonucleotide that does not have the at least one modified nucleoside. The oligonucleotide may have a plurality of modified nucleosides that result in a total increase in Tm of the oligonucleotide in a range of 2° C., 3° C., 4° C., 5° C., 6° C., 7° C., 8° C., 9° C., 10° C., 15° C., 20° C., 25° C., 30° C., 35° C., 40° C., 45° C. or more compared with an oligonucleotide that does not have the modified nucleoside.

[0250] The oligonucleotide may comprise a mix of nucleosides of different kinds. For example, an oligonucleotide may comprise a mix of 2′-deoxyribonucleosides or ribonucleosides and 2′-fluoro modified nucleosides. An oligonucleotide may comprise a mix of deoxyribonucleosides or ribonucleosides and 2′-O-Me modified nucleosides. An oligonucleotide may comprise a mix of 2′-fluoro modified nucleosides and 2′-O-methyl modified nucleosides. An oligonucleotide may comprise a mix of bridged nucleosides and 2′-fluoro or 2′-O-methyl modified nucleosides. An oligonucleotide may comprise a mix of non-bicyclic 2′-modified nucleosides (e.g., 2′-O-MOE) and 2′-4′ bicyclic nucleosides (e.g., LNA, ENA, cEt). An oligonucleotide may comprise a mix of 2′-fluoro modified nucleosides and 2′-O-Me modified nucleosides. An oligonucleotide may comprise a mix of 2′-4′ bicyclic nucleosides and 2′-MOE, 2′-fluoro, or 2′-O-Me modified nucleosides. An oligonucleotide may comprise a mix of non-bicyclic 2′-modified nucleosides (e.g., 2′-MOE, 2′-fluoro, or 2′-O-Me) and 2′-4′ bicyclic nucleosides (e.g., LNA, ENA, cEt).

[0251] The oligonucleotide may comprise alternating nucleosides of different kinds. For example, an oligonucleotide may comprise alternating 2′-deoxyribonucleosides or ribonucleosides and 2′-fluoro modified nucleosides. An oligonucleotide may comprise alternating deoxyribonucleosides or ribonucleosides and 2′-O-Me modified nucleosides. An oligonucleotide may comprise alternating 2′-fluoro modified nucleosides and 2′-O-Me modified nucleosides. An oligonucleotide may comprise alternating bridged nucleosides and 2′-fluoro or 2′-O-methyl modified nucleosides. An oligonucleotide may comprise alternating non-bicyclic 2′-modified nucleosides (e.g., 2′-O-MOE) and 2′-4′ bicyclic nucleosides (e.g., LNA, ENA, cEt). An oligonucleotide may comprise alternating 2′-4′ bicyclic nucleosides and 2′-MOE, 2′-fluoro, or 2′-O-Me modified nucleosides. An oligonucleotide may comprise alternating non-bicyclic 2′-modified nucleosides (e.g., 2′-MOE, 2′-fluoro, or 2′-O-Me) and 2′-4′ bicyclic nucleosides (e.g., LNA, ENA, cEt).

[0252] In some embodiments, an oligonucleotide described herein comprises a 5′-vinylphosphonate modification, one or more abasic residues, and/or one or more inverted abasic residues.

[0253] d. Internucleoside Linkages/Backbones

[0254] In some embodiments, oligonucleotide may contain a phosphorothioate or other modified internucleoside linkage. In some embodiments, the oligonucleotide comprises phosphorothioate internucleoside linkages. In some embodiments, the oligonucleotide comprises phosphorothioate internucleoside linkages between at least two nucleosides. In some embodiments, the oligonucleotide comprises phosphorothioate internucleoside linkages between all nucleosides. For example, in some embodiments, oligonucleotides comprise modified internucleoside linkages at the first, second, and/or (e.g., and) third internucleoside linkage at the 5′ or 3′ end of the nucleotide sequence.

[0255] Phosphorus-containing linkages that may be used include, but are not limited to, phosphorothioates, chiral phosphorothioates, phosphorodithioates, phosphotriesters, aminoalkylphosphotriesters, methyl and other alkyl phosphonates comprising 3′ alkylene phosphonates and chiral phosphonates, phosphinates, phosphoramidates comprising 3′-amino phosphoramidate and aminoalkylphosphoramidates, thionophosphoramidates, thionoalkylphosphonates, thionoalkylphosphotriesters, and boranophosphates having normal 3′-5′ linkages, 2′-5′ linked analogs of these, and those having inverted polarity wherein the adjacent pairs of nucleoside units are linked 3′-5′ to 5′-3′ or 2′-5′ to 5′-2′; see U.S. Pat. Nos. 3,687,808; 4,469,863; 4,476,301; 5,023,243; 5,177,196; 5,188,897; 5,264,423; 5,276,019; 5,278,302; 5,286,717; 5,321,131; 5,399,676; 5,405,939; 5,453,496; 5,455,233; 5,466,677; 5,476,925; 5,519,126; 5,536,821; 5,541,306; 5,550,111; 5,563,253; 5,571,799; 5,587,361; and 5,625,050.

[0256] In some embodiments, oligonucleotides may have heteroatom backbones, such as methylene(methylimino) or MMI backbones; amide backbones (see De Mesmaeker et al. Ace. Chem. Res. 1995, 28:366-374); morpholino backbones (see Summerton and Weller, U.S. Pat. No. 5,034,506); or peptide nucleic acid (PNA) backbones (wherein the phosphodiester backbone of the oligonucleotide is replaced with a polyamide backbone, the nucleotides being bound directly or indirectly to the aza nitrogen atoms of the polyamide backbone, see Nielsen et al., Science 1991, 254, 1497).

[0257] e. Stereospecific Oligonucleotides

[0258] In some embodiments, internucleotidic phosphorus atoms of oligonucleotides are chiral, and the properties of the oligonucleotides are adjusted based on the configuration of the chiral phosphorus atoms. In some embodiments, appropriate methods may be used to synthesize P-chiral oligonucleotide analogs in a stereocontrolled manner (e.g., as described in Oka N, Wada T, Stereocontrolled synthesis of oligonucleotide analogs containing chiral internucleotidic phosphorus atoms. Chem Soc Rev. 2011 December; 40(12):5829-43.) In some embodiments, phosphorothioate containing oligonucleotides are provided that comprise nucleoside units that are joined together by either substantially all Sp or substantially all Rp phosphorothioate intersugar linkages. In some embodiments, such phosphorothioate oligonucleotides having substantially chirally pure intersugar linkages are prepared by enzymatic or chemical synthesis, as described, for example, in U.S. Pat. No. 5,587,261, issued on Dec. 12, 1996, the contents of which are incorporated herein by reference in their entirety. In some embodiments, chirally controlled oligonucleotides provide selective cleavage patterns of a target nucleic acid. For example, in some embodiments, a chirally controlled oligonucleotide provides single site cleavage within a complementary sequence of a nucleic acid, as described, for example, in US Patent Application Publication 20170037399 A1, published on Feb. 2, 2017, entitled “CHIRAL DESIGN”, the contents of which are incorporated herein by reference in their entirety.

[0259] f. Morpholinos

[0260] In some embodiments, the oligonucleotide may be a morpholino-based compounds. Morpholino-based oligomeric compounds are described in Dwaine A. Braasch and David R. Corey, Biochemistry, 2002, 41(14), 4503-4510); Genesis, volume 30, issue 3, 2001; Heasman, J., Dev. Biol., 2002, 243, 209-214; Nasevicius et al., Nat. Genet., 2000, 26, 216-220; Lacerra et al., Proc. Natl. Acad. Sci., 2000, 97, 9591-9596; and U.S. Pat. No. 5,034,506, issued Jul. 23, 1991. In some embodiments, the morpholino-based oligomeric compound is a phosphorodiamidate morpholino oligomer (PMO) (e.g., as described in Iverson, Curr. Opin. Mol. Ther., 3:235-238, 2001; and Wang et al., J. Gene Med., 12:354-364, 2010; the disclosures of which are incorporated herein by reference in their entireties).

[0261] h. Gapmers

[0262] In some embodiments, an oligonucleotide described herein is a gapmer. A gapmer oligonucleotide generally has the formula 5′-X-Y-Z-3′, with X and Z as flanking regions around a gap region Y. In some embodiments, flanking region X of formula 5′-X-Y-Z-3′ is also referred to as X region, flanking sequence X, 5′ wing region X, or 5′ wing segment. In some embodiments, flanking region Z of formula 5′-X-Y-Z-3′ is also referred to as Z region, flanking sequence Z, 3′ wing region Z, or 3′ wing segment. In some embodiments, gap region Y of formula 5′-X-Y-Z-3′ is also referred to as Y region, Y segment, or gap-segment Y. In some embodiments, each nucleoside in the gap region Y is a 2′-deoxyribonucleoside, and neither the 5′ wing region X or the 3′ wing region Z contains any 2′-deoxyribonucleosides.

[0263] In some embodiments, the Y region is a contiguous stretch of nucleotides, e.g., a region of 6 or more DNA nucleotides, which are capable of recruiting an RNAse, such as RNAse H. In some embodiments, the gapmer binds to the target nucleic acid, at which point an RNAse is recruited and can then cleave the target nucleic acid. In some embodiments, the Y region is flanked both 5′ and 3′ by regions X and Z comprising high-affinity modified nucleosides, e.g., one to six high-affinity modified nucleosides. Examples of high affinity modified nucleosides include, but are not limited to, 2′-modified nucleosides (e.g., 2′-MOE, 2′O-Me, 2′-F) or 2′-4′ bicyclic nucleosides (e.g., LNA, cEt, ENA). In some embodiments, the flanking sequences X and Z may be of 1-20 nucleotides, 1-8 nucleotides, or 1-5 nucleotides in length. The flanking sequences X and Z may be of similar length or of dissimilar lengths. In some embodiments, the gap-segment Y may be a nucleotide sequence of 5-20 nucleotides, 5-15 twelve nucleotides, or 6-10 nucleotides in length.

[0264] In some embodiments, the gap region of the gapmer oligonucleotides may contain modified nucleotides known to be acceptable for efficient Rnase H action in addition to DNA nucleotides, such as C4′-substituted nucleotides, acyclic nucleotides, and arabino-configured nucleotides. In some embodiments, the gap region comprises one or more unmodified internucleoside linkages. In some embodiments, one or both flanking regions each independently comprise one or more phosphorothioate internucleoside linkages (e.g., phosphorothioate internucleoside linkages or other linkages) between at least two, at least three, at least four, at least five or more nucleotides. In some embodiments, the gap region and two flanking regions each independently comprise modified internucleoside linkages (e.g., phosphorothioate internucleoside linkages or other linkages) between at least two, at least three, at least four, at least five or more nucleotides.

[0265] A gapmer may be produced using appropriate methods. Representative U.S. patents, U.S. patent publications, and PCT publications that teach the preparation of gapmers include, but are not limited to, U.S. Pat. Nos. 5,013,830; 5,149,797; 5,220,007; 5,256,775; 5,366,878; 5,403,711; 5,491,133; 5,565,350; 5,623,065; 5,652,355; 5,652,356; 5,700,922; 5,898,031; 7,015,315; 7,101,993; 7,399,845; 7,432,250; 7,569,686; 7,683,036; 7,750,131; 8,580,756; 9,045,754; 9,428,534; 9,695,418; 10,017,764; 10,260,069; 9,428,534; 8,580,756; U.S. patent publication Nos. US20050074801, US20090221685; US20090286969, US20100197762, and US20110112170; PCT publication Nos. WO2004069991; WO2005023825; WO2008049085 and WO2009090182; and EP Patent No. EP2,149,605, each of which is herein incorporated by reference in its entirety.

[0266] In some embodiments, a gapmer is 10-40 nucleosides in length. For example, the gapmer may be 10-40, 10-35, 10-30, 10-25, 10-20, 10-15, 15-40, 15-35, 15-30, 15-25, 15-20, 20-40, 20-35, 20-30, 20-25, 25-40, 25-35, 25-30, 30-40, 30-35, or 35-40 nucleosides in length. In some embodiments, a gapmer is 10, 11, 12, 13, 14, 15, 16, 17, 18, 19, 20, 21, 22, 23, 24, 25, 26, 27, 28, 29, 30, 31, 32, 33, 34, 35, 36, 37, 38, 39, or 40 nucleosides in length.

[0267] In some embodiments, the gap region Y in a gapmer is 5-20 nucleosides in length. For example, the gap region Y may be 5-20, 5-15, 5-10, 10-20, 10-15, or 15-20 nucleosides in length. In some embodiments, the gap region Y is 5, 6, 7, 8, 9, 10, 11, 12, 13, 14, 15, 16, 17, 18, 19, or 20 nucleosides in length. In some embodiments, each nucleoside in the gap region Y is a 2′-deoxyribonucleoside. In some embodiments, all nucleosides in the gap region Y are 2′-deoxyribonucleosides. In some embodiments, one or more of the nucleosides in the gap region Y is a modified nucleoside (e.g., a 2′ modified nucleoside such as those described herein). In some embodiments, one or more cytosines in the gap region Y are optionally 5-methyl-cytosines. In some embodiments, each cytosine in the gap region Y is a 5-methyl-cytosines.

[0268] In some embodiments, the 5′wing region of a gapmer (X in the 5′-X-Y-Z-3′ formula) and the 3′wing region of a gapmer (Z in the 5′-X-Y-Z-3′ formula) are independently 1-20 nucleosides long. For example, the 5′wing region of a gapmer (X in the 5′-X-Y-Z-3′ formula) and the 3′wing region of the gapmer (Z in the 5′-X-Y-Z-3′ formula) may be independently 1-20, 1-15, 1-10, 1-7, 1-5, 1-3, 1-2, 2-5, 2-7, 3-5, 3-7, 5-20, 5-15, 5-10, 10-20, 10-15, or 15-20 nucleosides long. In some embodiments, the 5′wing region of the gapmer (X in the 5′-X-Y-Z-3′ formula) and the 3′wing region of the gapmer (Z in the 5′-X-Y-Z-3′ formula) are independently 1, 2, 3, 4, 5, 6, 7, 8, 9, 10, 11, 12, 13, 14, 15, 16, 17, 18, 19, or 20 nucleosides long. In some embodiments, the 5′wing region of the gapmer (X in the 5′-X-Y-Z-3′ formula) and the 3′wing region of the gapmer (Z in the 5′-X-Y-Z-3′ formula) are of the same length. In some embodiments, the 5′wing region of the gapmer (X in the 5′-X-Y-Z-3′ formula) and the 3′wing region of the gapmer (Z in the 5′-X-Y-Z-3′ formula) are of different lengths. In some embodiments, the 5′wing region of the gapmer (X in the 5′-X-Y-Z-3′ formula) is longer than the 3′wing region of the gapmer (Z in the 5′-X-Y-Z-3′ formula). In some embodiments, the 5′wing region of the gapmer (X in the 5′-X-Y-Z-3′ formula) is shorter than the 3′wing region of the gapmer (Z in the 5′-X-Y-Z-3′ formula).

[0269] In some embodiments, a gapmer comprises a 5′-X-Y-Z-3′ of 5-10-5, 4-12-4, 3-14-3, 2-16-2, 1-18-1, 3-10-3, 2-10-2, 1-10-1, 2-8-2, 4-6-4, 3-6-3, 2-6-2, 4-7-4, 3-7-3, 2-7-2, 4-8-4, 3-8-3, 2-8-2, 1-8-1, 2-9-2, 1-9-1, 2-10-2, 1-10-1, 1-12-1, 1-16-1, 2-15-1, 1-15-2, 1-14-3, 3-14-1, 2-14-2, 1-13-4, 4-13-1, 2-13-3, 3-13-2, 1-12-5, 5-12-1, 2-12-4, 4-12-2, 3-12-3, 1-11-6, 6-11-1, 2-11-5, 5-11-2, 3-11-4, 4-11-3, 1-17-1, 2-16-1, 1-16-2, 1-15-3, 3-15-1, 2-15-2, 1-14-4, 4-14-1, 2-14-3, 3-14-2, 1-13-5, 5-13-1, 2-13-4, 4-13-2, 3-13-3, 1-12-6, 6-12-1, 2-12-5, 5-12-2, 3-12-4, 4-12-3, 1-11-7, 7-11-1, 2-11-6, 6-11-2, 3-11-5, 5-11-3, 4-11-4, 1-18-1, 1-17-2, 2-17-1, 1-16-3, 1-16-3, 2-16-2, 1-15-4, 4-15-1, 2-15-3, 3-15-2, 1-14-5, 5-14-1, 2-14-4, 4-14-2, 3-14-3, 1-13-6, 6-13-1, 2-13-5, 5-13-2, 3-13-4, 4-13-3, 1-12-7, 7-12-1, 2-12-6, 6-12-2, 3-12-5, 5-12-3, 1-11-8, 8-11-1, 2-11-7, 7-11-2, 3-11-6, 6-11-3, 4-11-5, 5-11-4, 1-18-1, 1-17-2, 2-17-1, 1-16-3, 3-16-1, 2-16-2, 1-15-4, 4-15-1, 2-15-3, 3-15-2, 1-14-5, 2-14-4, 4-14-2, 3-14-3, 1-13-6, 6-13-1, 2-13-5, 5-13-2, 3-13-4, 4-13-3, 1-12-7, 7-12-1, 2-12-6, 6-12-2, 3-12-5, 5-12-3, 1-11-8, 8-11-1, 2-11-7, 7-11-2, 3-11-6, 6-11-3, 4-11-5, 5-11-4, 1-19-1, 1-18-2, 2-18-1, 1-17-3, 3-17-1, 2-17-2, 1-16-4, 4-16-1, 2-16-3, 3-16-2, 1-15-5, 2-15-4, 4-15-2, 3-15-3, 1-14-6, 6-14-1, 2-14-5, 5-14-2, 3-14-4, 4-14-3, 1-13-7, 7-13-1, 2-13-6, 6-13-2, 3-13-5, 5-13-3, 4-13-4, 1-12-8, 8-12-1, 2-12-7, 7-12-2, 3-12-6, 6-12-3, 4-12-5, 5-12-4, 2-11-8, 8-11-2, 3-11-7, 7-11-3, 4-11-6, 6-11-4, 5-11-5, 1-20-1, 1-19-2, 2-19-1, 1-18-3, 3-18-1, 2-18-2, 1-17-4, 4-17-1, 2-17-3, 3-17-2, 1-16-5, 2-16-4, 4-16-2, 3-16-3, 1-15-6, 6-15-1, 2-15-5, 5-15-2, 3-15-4, 4-15-3, 1-14-7, 7-14-1, 2-14-6, 6-14-2, 3-14-5, 5-14-3, 4-14-4, 1-13-8, 8-13-1, 2-13-7, 7-13-2, 3-13-6, 6-13-3, 4-13-5, 5-13-4, 2-12-8, 8-12-2, 3-12-7, 7-12-3, 4-12-6, 6-12-4, 5-12-5, 3-11-8, 8-11-3, 4-11-7, 7-11-4, 5-11-6, 6-11-5, 1-21-1, 1-20-2, 2-20-1, 1-20-3, 3-19-1, 2-19-2, 1-18-4, 4-18-1, 2-18-3, 3-18-2, 1-17-5, 2-17-4, 4-17-2, 3-17-3, 1-16-6, 6-16-1, 2-16-5, 5-16-2, 3-16-4, 4-16-3, 1-15-7, 7-15-1, 2-15-6, 6-15-2, 3-15-5, 5-15-3, 4-15-4, 1-14-8, 8-14-1, 2-14-7, 7-14-2, 3-14-6, 6-14-3, 4-14-5, 5-14-4, 2-13-8, 8-13-2, 3-13-7, 7-13-3, 4-13-6, 6-13-4, 5-13-5, 1-12-10, 10-12-1, 2-12-9, 9-12-2, 3-12-8, 8-12- 3, 4-12-7, 7-12-4, 5-12-6, 6-12-5, 4-11-8, 8-11-4, 5-11-7, 7-11-5, 6-11-6, 1-22-1, 1-21-2, 2-21-1, 1-21-3, 3-20-1, 2-20-2, 1-19-4, 4-19-1, 2-19-3, 3-19-2, 1-18-5, 2-18-4, 4-18-2, 3-18-3, 1-17-6, 6-17-1, 2-17-5, 5-17-2, 3-17-4, 4-17-3, 1-16-7, 7-16-1, 2-16-6, 6-16-2, 3-16-5, 5-16-3, 4-16-4, 1-15-8, 8-15-1, 2-15-7, 7-15-2, 3-15-6, 6-15-3, 4-15-5, 5-15-4, 2-14-8, 8-14-2, 3-14-7, 7-14-3, 4-14-6, 6-14-4, 5-14-5, 3-13-8, 8-13-3, 4-13-7, 7-13-4, 5-13-6, 6-13-5, 4-12-8, 8-12-4, 5-12-7, 7-12-5, 6-12-6, 5-11-8, 8-11-5, 6-11-7, or 7-11-6. The numbers indicate the number of nucleosides in X, Y, and Z regions in the 5′-X-Y-Z-3′ gapmer.

[0270] In some embodiments, one or more nucleosides in the 5′wing region of the gapmer (X in the 5′-X-Y-Z-3′ formula) or the 3′wing region of a gapmer (Z in the 5′-X-Y-Z-3′ formula) are modified nucleosides (e.g., high-affinity modified nucleosides). In some embodiments, the modified nucleoside (e.g., high-affinity modified nucleosides) is a 2′-modified nucleoside. In some embodiments, the 2′-modified nucleoside is a 2′-4′ bicyclic nucleoside or a non-bicyclic 2′-modified nucleoside. In some embodiments, the high-affinity modified nucleoside is a 2′-4′ bicyclic nucleoside (e.g., LNA, cEt, or ENA) or a non-bicyclic 2′-modified nucleoside (e.g., 2′-fluoro (2′-F), 2′-O-methyl (2′-O-Me), 2′-O-methoxyethyl (2′-MOE), 2′-O-aminopropyl (2′-O-AP), 2′-O-dimethylaminoethyl (2′-O-DMAOE), 2′-O-dimethylaminopropyl (2′-O-DMAP), 2′-O-dimethylaminoethyloxyethyl (2′-O-DMAEOE), or 2′-O—N-methylacetamido (2′-O-NMA)).

[0271] In some embodiments, one or more nucleosides in the 5′wing region of a gapmer (X in the 5′-X-Y-Z-3′ formula) are high-affinity modified nucleosides. In some embodiments, each nucleoside in the 5′wing region of the gapmer (X in the 5′-X-Y-Z-3′ formula) is a high-affinity modified nucleoside. In some embodiments, one or more nucleosides in the 3′wing region of a gapmer (Z in the 5′-X-Y-Z-3′ formula) are high-affinity modified nucleosides. In some embodiments, each nucleoside in the 3′wing region of the gapmer (Z in the 5′-X-Y-Z-3′ formula) is a high-affinity modified nucleoside. In some embodiments, one or more nucleosides in the 5′wing region of the gapmer (X in the 5′-X-Y-Z-3′ formula) are high-affinity modified nucleosides and one or more nucleosides in the 3′wing region of the gapmer (Z in the 5′-X-Y-Z-3′ formula) are high-affinity modified nucleosides. In some embodiments, each nucleoside in the 5′wing region of the gapmer (X in the 5′-X-Y-Z-3′ formula) is a high-affinity modified nucleoside and each nucleoside in the 3′wing region of the gapmer (Z in the 5′-X-Y-Z-3′ formula) is high-affinity modified nucleoside.

[0272] In some embodiments, the 5′wing region of a gapmer (X in the 5′-X-Y-Z-3′ formula) comprises the same high affinity nucleosides as the 3′wing region of the gapmer (Z in the 5′-X-Y-Z-3′ formula). For example, the 5′wing region of the gapmer (X in the 5′-X-Y-Z-3′ formula) and the 3′wing region of the gapmer (Z in the 5′-X-Y-Z-3′ formula) may comprise one or more non-bicyclic 2′-modified nucleosides (e.g., 2′-MOE or 2′-O-Me). In another example, the 5′wing region of the gapmer (X in the 5′-X-Y-Z-3′ formula) and the 3′wing region of the gapmer (Z in the 5′-X-Y-Z-3′ formula) may comprise one or more 2′-4′ bicyclic nucleosides (e.g., LNA or cEt). In some embodiments, each nucleoside in the 5′wing region of the gapmer (X in the 5′-X-Y-Z-3′ formula) and the 3′wing region of the gapmer (Z in the 5′-X-Y-Z-3′ formula) is a non-bicyclic 2′-modified nucleosides (e.g., 2′-MOE or 2′-O-Me). In some embodiments, each nucleoside in the 5′wing region of the gapmer (X in the 5′-X-Y-Z-3′ formula) and the 3′wing region of the gapmer (Z in the 5′-X-Y-Z-3′ formula) is a 2′-4′ bicyclic nucleosides (e.g., LNA or cEt).

[0273] In some embodiments, a gapmer comprises a 5′-X-Y-Z-3′ configuration, wherein X and Z is independently 1-7 (e.g., 1, 2, 3, 4, 5, 6, or 7) nucleosides in length and Y is 6-10 (e.g., 6, 7, 8, 9, or 10) nucleosides in length, wherein each nucleoside in X and Z is a non-bicyclic 2′-modified nucleosides (e.g., 2′-MOE or 2′-O-Me) and each nucleoside in Y is a 2′-deoxyribonucleoside. In some embodiments, the gapmer comprises a 5′-X-Y-Z-3′ configuration, wherein X and Z is independently 1-7 (e.g., 1, 2, 3, 4, 5, 6, or 7) nucleosides in length and Y is 6-10 (e.g., 6, 7, 8, 9, or 10) nucleosides in length, wherein each nucleoside in X and Z is a 2′-4′ bicyclic nucleosides (e.g., LNA or cEt) and each nucleoside in Y is a 2′-deoxyribonucleoside. In some embodiments, the 5′wing region of the gapmer (X in the 5′-X-Y-Z-3′ formula) comprises different high affinity nucleosides as the 3′wing region of the gapmer (Z in the 5′-X-Y-Z-3′ formula). For example, the 5′wing region of the gapmer (X in the 5′-X-Y-Z-3′ formula) may comprise one or more non-bicyclic 2′-modified nucleosides (e.g., 2′-MOE or 2′-O-Me) and the 3′wing region of the gapmer (Z in the 5′-X-Y-Z-3′ formula) may comprise one or more 2′-4′ bicyclic nucleosides (e.g., LNA or cEt). In another example, the 3′wing region of the gapmer (Z in the 5′-X-Y-Z-3′ formula) may comprise one or more non-bicyclic 2′-modified nucleosides (e.g., 2′-MOE or 2′-O-Me) and the 5′wing region of the gapmer (X in the 5′-X-Y-Z-3′ formula) may comprise one or more 2′-4′ bicyclic nucleosides (e.g., LNA or cEt).

[0274] In some embodiments, a gapmer comprises a 5′-X-Y-Z-3′ configuration, wherein X and Z is independently 1-7 (e.g., 1, 2, 3, 4, 5, 6, or 7) nucleosides in length and Y is 6-10 (e.g., 6, 7, 8, 9, or 10) nucleosides in length, wherein each nucleoside in X is a non-bicyclic 2′-modified nucleoside (e.g., 2′-MOE or 2′-O-Me), each nucleoside in Z is a 2′-4′ bicyclic nucleoside (e.g., LNA or cEt), and each nucleoside in Y is a 2′-deoxyribonucleoside. In some embodiments, the gapmer comprises a 5′-X-Y-Z-3′ configuration, wherein X and Z is independently 1-7 (e.g., 1, 2, 3, 4, 5, 6, or 7) nucleosides in length and Y is 6-10 (e.g., 6, 7, 8, 9, or 10) nucleosides in length, wherein each nucleoside in X is a 2′-4′ bicyclic nucleoside (e.g., LNA or cEt), each nucleoside in Z is a non-bicyclic 2′-modified nucleoside (e.g., 2′-MOE or 2′-O-Me) and each nucleoside in Y is a 2′-deoxyribonucleoside.

[0275] In some embodiments, the 5′wing region of a gapmer (X in the 5′-X-Y-Z-3′ formula) comprises one or more non-bicyclic 2′-modified nucleosides (e.g., 2′-MOE or 2′-O-Me) and one or more 2′-4′ bicyclic nucleosides (e.g., LNA or cEt). In some embodiments, the 3′wing region of the gapmer (Z in the 5′-X-Y-Z-3′ formula) comprises one or more non-bicyclic 2′-modified nucleosides (e.g., 2′-MOE or 2′-O-Me) and one or more 2′-4′ bicyclic nucleosides (e.g., LNA or cEt). In some embodiments, both the 5′wing region of the gapmer (X in the 5′-X-Y-Z-3′ formula) and the 3′wing region of the gapmer (Z in the 5′-X-Y-Z-3′ formula) comprise one or more non-bicyclic 2′-modified nucleosides (e.g., 2′-MOE or 2′-O-Me) and one or more 2′-4′ bicyclic nucleosides (e.g., LNA or cEt).

[0276] In some embodiments, a gapmer comprises a 5′-X-Y-Z-3′ configuration, wherein X and Z are independently 2-7 (e.g., 2, 3, 4, 5, 6, or 7) nucleosides in length and Y is 6-10 (e.g., 6, 7, 8, 9, or 10) nucleosides in length, wherein at least one but not all (e.g., 1, 2, 3, 4, 5, or 6) of positions 1, 2, 3, 4, 5, 6, or 7 in X (the 5′ most position is position 1) is a non-bicyclic 2′-modified nucleoside (e.g., 2′-MOE or 2′-O-Me), wherein the rest of the nucleosides in both X and Z are 2′-4′ bicyclic nucleosides (e.g., LNA or cEt), and wherein each nucleoside in Y is a 2′deoxyribonucleoside. In some embodiments, the gapmer comprises a 5′-X-Y-Z-3′ configuration, wherein X and Z are independently 2-7 (e.g., 2, 3, 4, 5, 6, or 7) nucleosides in length and Y is 6-10 (e.g., 6, 7, 8, 9, or 10) nucleosides in length, wherein at least one but not all (e.g., 1, 2, 3, 4, 5, or 6) of positions 1, 2, 3, 4, 5, 6, or 7 in Z (the 5′ most position is position 1) is a non-bicyclic 2′-modified nucleoside (e.g., 2′-MOE or 2′-O-Me), wherein the rest of the nucleosides in both X and Z are 2′-4′ bicyclic nucleosides (e.g., LNA or cEt), and wherein each nucleoside in Y is a 2′deoxyribonucleoside. In some embodiments, the gapmer comprises a 5′-X-Y-Z-3′ configuration, wherein X and Z are independently 2-7 (e.g., 2, 3, 4, 5, 6, or 7) nucleosides in length and Y is 6-10 (e.g., 6, 7, 8, 9, or 10) nucleosides in length, wherein at least one but not all (e.g., 1, 2, 3, 4, 5, or 6) of positions 1, 2, 3, 4, 5, 6, or 7 in X and at least one of positions but not all (e.g., 1, 2, 3, 4, 5, or 6) of positions 1, 2, 3, 4, 5, 6, or 7 in Z (the 5′ most position is position 1) is a non-bicyclic 2′-modified nucleoside (e.g., 2′-MOE or 2′-O-Me), wherein the rest of the nucleosides in both X and Z are 2′-4′ bicyclic nucleosides (e.g., LNA or cEt), and wherein each nucleoside in Y is a 2′deoxyribonucleoside.

[0277] Non-limiting examples of gapmers configurations with a mix of non-bicyclic 2′-modified nucleoside (e.g., 2′-MOE or 2′-O-Me) and 2′-4′ bicyclic nucleosides (e.g., LNA or cEt) in the 5′wing region of the gapmer (X in the 5′-X-Y-Z-3′ formula) and/or the 3′wing region of the gapmer (Z in the 5′-X-Y-Z-3′ formula) include: BBB-(D)n-BBBAA; KKK-(D)n-KKKAA; LLL-(D)n-LLLAA; BBB-(D)n-BBBEE; KKK-(D)n-KKKEE; LLL-(D)n-LLLEE; BBB-(D)n-BBBAA; KKK-(D)n-KKKAA; LLL-(D)n-LLLAA; BBB-(D)n-BBBEE; KKK-(D)n-KKKEE; LLL-(D)n-LLLEE; BBB-(D)n-BBBAAA; KKK-(D)n-KKKAAA; LLL-(D)n-LLLAAA; BBB-(D)n-BBBEEE; KKK-(D)n-KKKEEE; LLL-(D)n-LLLEEE; BBB-(D)n-BBBAAA; KKK-(D)n-KKKAAA; LLL-(D)n-LLLAAA; BBB-(D)n-BBBEEE; KKK-(D)n-KKKEEE; LLL-(D)n-LLLEEE; BABA-(D)n-ABAB; KAKA-(D)n-AKAK; LALA-(D)n-ALAL; BEBE-(D)n-EBEB; KEKE-(D)n-EKEK; LELE-(D)n-ELEL; BABA-(D)n-ABAB; KAKA-(D)n-AKAK; LALA-(D)n-ALAL; BEBE-(D)n-EBEB; KEKE-(D)n-EKEK; LELE-(D)n-ELEL; ABAB-(D)n-ABAB; AKAK-(D)n-AKAK; ALAL-(D)n-ALAL; EBEB-(D)n-EBEB; EKEK-(D)n-EKEK; ELEL-(D)n-ELEL; ABAB-(D)n-ABAB; AKAK-(D)n-AKAK; ALAL-(D)n-ALAL; EBEB-(D)n-EBEB; EKEK-(D)n-EKEK; ELEL-(D)n-ELEL; AABB-(D)n-BBAA; BBAA-(D)n-AABB; AAKK-(D)n-KKAA; AALL-(D)n-LLAA; EEBB-(D)n-BBEE; EEKK-(D)n-KKEE; EELL-(D)n-LLEE; AABB-(D)n-BBAA; AAKK-(D)n-KKAA; AALL-(D)n-LLAA; EEBB-(D)n-BBEE; EEKK-(D)n-KKEE; EELL-(D)n-LLEE; BBB-(D)n-BBA; KKK-(D)n-KKA; LLL-(D)n-LLA; BBB-(D)n-BBE; KKK-(D)n-KKE; LLL-(D)n-LLE; BBB-(D)n-BBA; KKK-(D)n-KKA; LLL-(D)n-LLA; BBB-(D)n-BBE; KKK-(D)n-KKE; LLL-(D)n-LLE; BBB-(D)n-BBA; KKK-(D)n-KKA; LLL-(D)n-LLA; BBB-(D)n-BBE; KKK-(D)n-KKE; LLL-(D)n-LLE; ABBB-(D)n-BBBA; AKKK-(D)n-KKKA; ALLL-(D)n-LLLA; EBBB-(D)n-BBBE; EKKK-(D)n-KKKE; ELLL-(D)n-LLLE; ABBB-(D)n-BBBA; AKKK-(D)n-KKKA; ALLL-(D)n-LLLA; EBBB-(D)n-BBBE; EKKK-(D)n-KKKE; ELLL-(D)n-LLLE; ABBB-(D)n-BBBAA; AKKK-(D)n-KKKAA; ALLL-(D)n-LLLAA; EBBB-(D)n-BBBEE; EKKK-(D)n-KKKEE; ELLL-(D)n-LLLEE; ABBB-(D)n-BBBAA; AKKK-(D)n-KKKAA; ALLL-(D)n-LLLAA; EBBB-(D)n-BBBEE; EKKK-(D)n-KKKEE; ELLL-(D)n-LLLEE; AABBB-(D)n-BBB; AAKKK-(D)n-KKK; AALLL-(D)n-LLL; EEBBB-(D)n-BBB; EEKKK-(D)n-KKK; EELLL-(D)n-LLL; AABBB-(D)n-BBB; AAKKK-(D)n-KKK; AALLL-(D)n-LLL; EEBBB-(D)n-BBB; EEKKK-(D)n-KKK; EELLL-(D)n-LLL; AABBB-(D)n-BBBA; AAKKK-(D)n-KKKA; AALLL-(D)n-LLLA; EEBBB-(D)n-BBBE; EEKKK-(D)n-KKKE; EELLL-(D)n-LLLE; AABBB-(D)n-BBBA; AAKKK-(D)n-KKKA; AALLL-(D)n-LLLA; EEBBB-(D)n-BBBE; EEKKK-(D)n-KKKE; EELLL-(D)n-LLLE; ABBAABB-(D)n-BB; AKKAAKK-(D)n-KK; ALLAALLL-(D)n-LL; EBBEEBB-(D)n-BB; EKKEEKK-(D)n-KK; ELLEELL-(D)n-LL; ABBAABB-(D)n-BB; AKKAAKK-(D)n-KK; ALLAALL-(D)n-LL; EBBEEBB-(D)n-BB; EKKEEKK-(D)n-KK; ELLEELL-(D)n-LL; ABBABB-(D)n-BBB; AKKAKK-(D)n-KKK; ALLALLL-(D)n-LLL; EBBEBB-(D)n-BBB; EKKEKK-(D)n-KKK; ELLELL-(D)n-LLL; ABBABB-(D)n-BBB; AKKAKK-(D)n-KKK; ALLALL-(D)n-LLL; EBBEBB-(D)n-BBB; EKKEKK-(D)n-KKK; ELLELL-(D)n-LLL; EEEK-(D)n-EEEEEEEE; EEK-(D)n-EEEEEEEEE; EK-(D)n-EEEEEEEEEE; EK-(D)n-EEEKK; K-(D)n-EEEKEKE; K-(D)n-EEEKEKEE; K-(D)n-EEKEK; EK-(D)n-EEEEKEKE; EK-(D)n-EEEKEK; EEK-(D)n-KEEKE; EK-(D)n-EEKEK; EK-(D)n-KEEK; EEK-(D)n-EEEKEK; EK-(D)n-KEEEKEE; EK-(D)n-EEKEKE; EK-(D)n-EEEKEKE; and EK-(D)n-EEEEKEK. “A” nucleosides comprise a 2′-modified nucleoside; “B” represents a 2′-4′ bicyclic nucleoside; “K” represents a constrained ethyl nucleoside (cEt); “L” represents an LNA nucleoside; and “E” represents a 2′-MOE modified ribonucleoside; “D” represents a 2′-deoxyribonucleoside; “n” represents the length of the gap segment (Y in the 5′-X-Y-Z-3′ configuration) and is an integer between 1-20.

[0278] In some embodiments, any one of the gapmers described herein comprises one or more modified nucleoside linkages (e.g., a phosphorothioate linkage) in each of the X, Y, and Z regions. In some embodiments, each internucleoside linkage in the any one of the gapmers described herein is a phosphorothioate linkage. In some embodiments, each of the X, Y, and Z regions independently comprises a mix of phosphorothioate linkages and phosphodiester linkages. In some embodiments, each internucleoside linkage in the gap region Y is a phosphorothioate linkage, the 5′wing region X comprises a mix of phosphorothioate linkages and phosphodiester linkages, and the 3′wing region Z comprises a mix of phosphorothioate linkages and phosphodiester linkages.

[0279] i. RNA Interference (RNAi)

[0280] In some embodiments, the DUX4-targeting oligonucleotides provided herein are small interfering RNAs (siRNA), also known as short interfering RNA or silencing RNA. SiRNA, is a class of double-stranded RNA molecules, typically about 20-25 base pairs in length that target nucleic acids (e.g., mRNAs) for degradation via the RNA interference (RNAi) pathway in cells. Specificity of siRNA molecules may be determined by the binding of the antisense strand of the molecule to its target RNA. Effective siRNA molecules are generally less than 30 to 35 base pairs in length to prevent the triggering of non-specific RNA interference pathways in the cell via the interferon response, although longer siRNA can also be effective. In some embodiments, the siRNA molecules are 7, 8, 9, 10, 11, 12, 13, 14, 15, 16, 17, 18, 19, 20, 21, 22, 23, 24, 25, 26, 27, 28, 29, 30, 35, 40, 45, 50, or more base pairs in length. In some embodiments, the siRNA molecules are 8 to 30 base pairs in length, 10 to 15 base pairs in length, 10 to 20 base pairs in length, 15 to 25 base pairs in length, 19 to 21 base pairs in length, 21 to 23 base pairs in length. In some embodiments, the siRNA molecules are 8 to 32 base pairs in length, 8 to 29 base pairs in length, 8 to 27 base pairs in length, 15 to 32 base pairs in length, 15 to 29 base pairs in length, 15 to 27 base pairs in length, 21 to 31 base pairs in length, 21 to 29 base pairs in length, 21 to 27 base pairs in length, 21-23 base pairs in length, 23 to 32 base pairs in length, 23 to 29 base pairs in length, or 23 to 27 base pairs in length.

[0281] Following selection of an appropriate target RNA sequence, siRNA molecules that comprise a nucleotide sequence complementary to all or a portion of the target sequence, i.e. an antisense sequence, can be designed and prepared using appropriate methods (see, e.g., PCT Publication Number WO 2004/016735; and U.S. Patent Publication Nos. 2004/0077574 and 2008/0081791).

[0282] The siRNA molecule can be double stranded (i.e. a dsRNA molecule comprising an antisense strand and a complementary sense strand) or single-stranded (i.e. a ssRNA molecule comprising just an antisense strand). The siRNA molecules can comprise a duplex, asymmetric duplex, hairpin or asymmetric hairpin secondary structure, having self-complementary sense and antisense strands. In some embodiments, the DUX4-targeting oligonucleotide described herein is a siRNA comprising an antisense strand and a sense strand.

[0283] In some embodiments, the antisense strand of the siRNA molecule is 7, 8, 9, 10, 11, 12, 13, 14, 15, 16, 17, 18, 19, 20, 21, 22, 23, 24, 25, 26, 27, 28, 29, 30, 35, 40, 45, 50, or more nucleotides in length. In some embodiments, the antisense strand is 8 to 50 nucleotides in length, 8 to 40 nucleotides in length, 8 to 30 nucleotides in length, 10 to 15 nucleotides in length, 10 to 20 nucleotides in length, 15 to 25 nucleotides in length, 19 to 21 nucleotides in length, 21 to 23 nucleotides in lengths. In some embodiments, the antisense strand is 8 to 32 nucleotides in length, 8 to 29 nucleotides in length, 8 to 27 nucleotides in length, 15 to 32 nucleotides in length, 15 to 29 nucleotides in length, 15 to 27 nucleotides in length, 21 to 31 nucleotides in length, 21 to 29 nucleotides in length, 21 to 27 nucleotides in length, 21-23 nucleotides in length, 23 to 32 nucleotides in length, 23 to 29 nucleotides in length, or 23 to 27 nucleotides in length.

[0284] In some embodiments, the sense strand of the siRNA molecule is 7, 8, 9, 10, 11, 12, 13, 14, 15, 16, 17, 18, 19, 20, 21, 22, 23, 24, 25, 26, 27, 28, 29, 30, 35, 40, 45, 50, or more nucleotides in length. In some embodiments, the sense strand is 8 to 50 nucleotides in length, 8 to 40 nucleotides in length, 8 to 30 nucleotides in length, 10 to 15 nucleotides in length, 10 to 20 nucleotides in length, 15 to 25 nucleotides in length, 19 to 21 nucleotides in length, 21 to 23 nucleotides in lengths. In some embodiments, the sense strand is 8 to 32 nucleotides in length, 8 to 29 nucleotides in length, 8 to 27 nucleotides in length, 15 to 32 nucleotides in length, 15 to 29 nucleotides in length, 15 to 27 nucleotides in length, 21 to 31 nucleotides in length, 21 to 29 nucleotides in length, 21 to 27 nucleotides in length, 21-23 nucleotides in length, 23 to 32 nucleotides in length, 23 to 29 nucleotides in length, or 23 to 27 nucleotides in length.

[0285] In some embodiments, siRNA molecules comprise an antisense strand comprising a region of complementarity to a target region in a DUX4 mRNA. In some embodiments, the region of complementarity is at least 80%, at least 85%, at least 90%, at least 91%, at least 92%, at least 93%, at least 94%, at least 95%, at least 96%, at least 97%, at least 98%, at least 99% or 100% complementary to a target region in a DUX4 mRNA. In some embodiments, the target region is a region of consecutive nucleotides in the DUX4 mRNA. In some embodiments, a complementary nucleotide sequence need not be 100% complementary to that of its target to be specifically hybridizable or specific for a target RNA sequence.

[0286] In some embodiments, siRNA molecules comprise an antisense strand that comprises a region of complementarity to a DUX4 mRNA sequence and the region of complementarity is in the range of 8 to 15, 8 to 30, 8 to 40, or 10 to 50, or 5 to 50, or 5 to 40 nucleotides in length. In some embodiments, a region of complementarity is 5, 6, 7, 8, 9, 10, 11, 12, 13, 14, 15, 16, 17, 18, 19, 20, 21, 22, 23, 24, 25, 26, 27, 28, 29, 30, 31, 32, 33, 34, 35, 36, 37, 38, 39, 40, 41, 42, 43, 44, 45, 46, 47, 48, 49, or 50 nucleotides in length. In some embodiments, the region of complementarity is complementary with at least 6, at least 7, at least 8, at least 9, at least 10, at least 11, at least 12, at least 13, at least 14, at least 15, at least 16, at least 17, at least 18, at least 19, at least 20, at least 21, at least 22, at least 23, at least 24, at least 25 or more consecutive nucleotides of a DUX4 mRNA sequence. In some embodiments, the region of complementarity comprises a nucleotide sequence that contains no more than 1, 2, 3, 4, or 5 base mismatches compared to the complementary portion of a DUX4 mRNA sequence. In some embodiments, the region of complementarity comprises a nucleotide sequence that has up to 3 mismatches over 15 bases, or up to 2 mismatches over 10 bases.

[0287] In some embodiments, siRNA molecules comprise an antisense strand comprising a nucleotide sequence that is complementary (e.g., at least 85%, at least 90%, at least 95%, or 100%) to a target RNA sequence as set forth in any one of SEQ ID NOs: 163-1574. In some embodiments, siRNA molecules comprise an antisense strand of 18-25 nucleotides in length and comprising a region of complementarity of at least 15 nucleotides (e.g., at least 15 nucleotides, at least 16 nucleotides, at least 17 nucleotides, at least 18 nucleotides, or at least 19 nucleotides) to a target RNA sequence as set forth in any one of SEQ ID NOs: 163-1574.

[0288] In some embodiments, siRNA molecules comprise an antisense strand comprising a nucleotide sequence that is complementary (e.g., at least 85%, at least 90%, at least 95%, or 100%) to a target RNA sequence as set forth in any one of SEQ ID NOs: 2987-3026. In some embodiments, siRNA molecules comprise an antisense strand of 18-25 nucleotides in length and comprising a region of complementarity of at least 15 nucleotides (e.g., at least 15 nucleotides, at least 16 nucleotides, at least 17 nucleotides, at least 18 nucleotides, or at least 19 nucleotides) to a target RNA sequence as set forth in any one of SEQ ID NOs: 2987-3026.

[0289] In some embodiments, siRNA molecules comprise an antisense strand comprising a nucleotide sequence that is at least 85%, at least 90%, at least 95%, or 100% identical to the oligonucleotides as set forth in any one of SEQ ID NOs: 1575-2986 and 3027-3066. In some embodiments, siRNA molecules comprise an antisense strand of 18-25 nucleotides in length and comprising at least 6, at least 7, at least 8, at least 9, at least 10, at least 11, at least 12, at least 13, at least 14, at least 15, at least 16, at least 17, at least 18, or at least 19 consecutive nucleotides of the oligonucleotides as set forth in any one of SEQ ID NOs: 1575-2986 and 3027-3066.

[0290] In some embodiments, siRNA molecules comprise an antisense strand comprising a nucleotide sequence that is at least 85%, at least 90%, at least 95%, or 100% identical to the oligonucleotides as set forth in any one of SEQ ID NOs: 3027-3066. In some embodiments, siRNA molecules comprise an antisense strand comprising at least 6, at least 7, at least 8, at least 9, at least 10, at least 11, at least 12, at least 13, at least 14, at least 15, at least 16, at least 17, at least 18, at least 19, at least 20, at least 21, at least 22, or at least 23 consecutive nucleotides of the oligonucleotides as set forth in any one of SEQ ID NOs: 3027-3066.

[0291] Double-stranded siRNA may comprise sense and antisense RNA strands that are the same length or different lengths. Double-stranded siRNA molecules can also be assembled from a single oligonucleotide in a stem-loop structure, wherein self-complementary sense and antisense regions of the siRNA molecule are linked by means of a nucleic acid based or non-nucleic acid-based linker(s), as well as circular single-stranded RNA having two or more loop structures and a stem comprising self-complementary sense and antisense strands, wherein the circular RNA can be processed either in vivo or in vitro to generate an active siRNA molecule capable of mediating RNAi. Small hairpin RNA (shRNA) molecules thus are also contemplated herein. These molecules comprise a specific antisense sequence in addition to the reverse complement (sense) sequence, typically separated by a spacer or loop sequence. Cleavage of the spacer or loop provides a single-stranded RNA molecule and its reverse complement, such that they may anneal to form a dsRNA molecule (optionally with additional processing steps that may result in addition or removal of one, two, three or more nucleotides from the 3′ end and/or (e.g., and) the 5′ end of either or both strands). A spacer can be of a sufficient length to permit the antisense and sense sequences to anneal and form a double-stranded structure (or stem) prior to cleavage of the spacer (and, optionally, subsequent processing steps that may result in addition or removal of one, two, three, four, or more nucleotides from the 3′ end and/or (e.g., and) the 5′ end of either or both strands). A spacer sequence may be an unrelated nucleotide sequence that is situated between two complementary nucleotide sequence regions which, when annealed into a double-stranded nucleic acid, comprise a shRNA.

[0292] The overall length of the siRNA molecules can vary from about 14 to about 100 nucleotides depending on the type of siRNA molecule being designed. Generally between about 14 and about 50 of these nucleotides are complementary to the RNA target sequence, i.e. constitute the specific antisense sequence of the siRNA molecule. For example, when the siRNA is a double- or single-stranded siRNA, the length can vary from about 14 to about 50 nucleotides, whereas when the siRNA is a shRNA or circular molecule, the length can vary from about 40 nucleotides to about 100 nucleotides.

[0293] An siRNA molecule may comprise a 3′ overhang at one end of the molecule. The other end may be blunt-ended or have also an overhang (5′ or 3′). When the siRNA molecule comprises an overhang at both ends of the molecule, the length of the overhangs may be the same or different. In one embodiment, the siRNA molecule of the present disclosure comprises 3′ overhangs of about 1 to about 3 (e.g., 1, 2, 3) nucleotides on both ends of the molecule. In some embodiments, the siRNA molecule comprises 3′ overhangs of about 1 to about 3 nucleotides on the sense strand. In some embodiments, the siRNA molecule comprises 3′ overhangs of about 1 to about 3 (e.g., 1, 2, 3) nucleotides on the antisense strand. In some embodiments, the siRNA molecule comprises 3′ overhangs of about 1 to about 3 (e.g., 1, 2, 3) nucleotides on both the sense strand and the antisense strand.

[0294] In some embodiments, the siRNA molecule comprises one or more modified nucleotides (e.g. 1, 2, 3, 4, 5, 6, 7, 8, 9, 10 or more). In some embodiments, the siRNA molecule comprises one or more modified nucleotides and/or (e.g., and) one or more modified internucleoside linkages. In some embodiments, the modified nucleotide is a modified sugar moiety (e.g. a 2′ modified nucleotide). In some embodiments, the siRNA molecule comprises one or more 2′ modified nucleotides, e.g., a 2′-deoxy, 2′-fluoro (2′-F), 2′-O-methyl (2′-O-Me), 2′-O-methoxyethyl (2′-MOE), 2′-O-aminopropyl (2′-O-AP), 2′-O-dimethylaminoethyl (2′-O-DMAOE), 2′-O-dimethylaminopropyl (2′-O-DMAP), 2′-O-dimethylaminoethyloxyethyl (2′-O-DMAEOE), or 2′-O—N-methylacetamido (2′-O-NMA). In some embodiments, each nucleotide of the siRNA molecule is a modified nucleotide (e.g., a 2′-modified nucleotide). In some embodiments, the siRNA molecule comprises one or more 2′-O-methyl modified nucleotides. In some embodiments, the siRNA molecule comprises one or more 2′-F modified nucleotides. In some embodiments, the siRNA molecule comprises one or more 2′-O-methyl and 2′-F modified nucleotides.

[0295] In some embodiments, the siRNA molecule contains a phosphorothioate or other modified internucleotide linkage. In some embodiments, the siRNA molecule comprises phosphorothioate internucleoside linkages. In some embodiments, the siRNA molecule comprises phosphorothioate internucleoside linkages between at least two nucleotides. In some embodiments, the siRNA molecule comprises phosphorothioate internucleoside linkages between all nucleotides. For example, in some embodiments, the siRNA molecule comprises modified internucleotide linkages at the first, second, and/or (e.g., and) third internucleoside linkage at the 5′ or 3′ end of the siRNA molecule.

[0296] In some embodiments, the modified internucleotide linkages are phosphorus-containing linkages. In some embodiments, phosphorus-containing linkages that may be used include, but are not limited to, phosphorothioates, chiral phosphorothioates, phosphorodithioates, phosphotriesters, aminoalkylphosphotriesters, methyl and other alkyl phosphonates comprising 3′ alkylene phosphonates and chiral phosphonates, phosphinates, phosphoramidates comprising 3′-amino phosphoramidate and aminoalkylphosphoramidates, thionophosphoramidates, thionoalkylphosphonates, thionoalkylphosphotriesters, and boranophosphates having normal 3′-5′ linkages, 2′-5′ linked analogs of these, and those having inverted polarity wherein the adjacent pairs of nucleoside units are linked 3′-5′ to 5′-3′ or 2′-5′ to 5′-2′; see U.S. Pat. Nos. 3,687,808; 4,469,863; 4,476,301; 5,023,243; 5,177,196; 5,188,897; 5,264,423; 5,276,019; 5,278,302; 5,286,717; 5,321,131; 5,399,676; 5,405,939; 5,453,496; 5,455,233; 5,466,677; 5,476,925; 5,519,126; 5,536,821; 5,541,306; 5,550,111; 5,563,253; 5,571,799; 5,587,361; and 5,625,050.

[0297] Any of the modified chemistries or formats of siRNA molecules described herein can be combined with each other. For example, one, two, three, four, five, or more different types of modifications can be included within the same siRNA molecule.

[0298] In some embodiments, the antisense strand comprises one or more modified nucleotides (e.g. 1, 2, 3, 4, 5, 6, 7, 8, 9, 10 or more). In some embodiments, the antisense strand comprises one or more modified nucleotides and/or (e.g., and) one or more modified internucleotide linkages. In some embodiments, the modified nucleotide comprises a modified sugar moiety (e.g. a 2′ modified nucleotide). In some embodiments, the antisense strand comprises one or more 2′ modified nucleotides, e.g., a 2′-deoxy, 2′-fluoro (2′-F), 2′-O-methyl (2′-O-Me), 2′-O-methoxyethyl (2′-MOE), 2′-O-aminopropyl (2′-O-AP), 2′-O-dimethylaminoethyl (2′-O-DMAOE), 2′-O-dimethylaminopropyl (2′-O-DMAP), 2′-O-dimethylaminoethyloxyethyl (2′-O-DMAEOE), or 2′-O—N-methylacetamido (2′-O-NMA). In some embodiments, each nucleotide of the antisense strand is a modified nucleotide (e.g., a 2′-modified nucleotide). In some embodiments, the antisense strand comprises one or more 2′-O-methyl modified nucleotides. In some embodiments, the antisense strand comprises one or more 2′-F modified nucleotides. In some embodiments, the antisense strand comprises one or more 2′-O-methyl and 2′-F modified nucleotides.

[0299] In some embodiments, antisense strand contains a phosphorothioate or other modified internucleotide linkage. In some embodiments, the antisense strand comprises phosphorothioate internucleoside linkages. In some embodiments, the antisense strand comprises phosphorothioate internucleoside linkages between at least two nucleotides. In some embodiments, the antisense strand comprises phosphorothioate internucleoside linkages between all nucleotides. For example, in some embodiments, the antisense strand comprises modified internucleotide linkages at the first, second, and/or (e.g., and) third internucleoside linkage at the 5′ or 3′ end of the siRNA molecule. In some embodiments, the two internucleoside linkages at the 3′ end of the antisense strands are phosphorothioate internucleoside linkages.

[0300] In some embodiments, the modified internucleotide linkages are phosphorus-containing linkages. In some embodiments, phosphorus-containing linkages that may be used include, but are not limited to, phosphorothioates, chiral phosphorothioates, phosphorodithioates, phosphotriesters, aminoalkylphosphotriesters, methyl and other alkyl phosphonates comprising 3′alkylene phosphonates and chiral phosphonates, phosphinates, phosphoramidates comprising 3′-amino phosphoramidate and aminoalkylphosphoramidates, thionophosphoramidates, thionoalkylphosphonates, thionoalkylphosphotriesters, and boranophosphates having normal 3′-5′ linkages, 2′-5′ linked analogs of these, and those having inverted polarity wherein the adjacent pairs of nucleoside units are linked 3′-5′ to 5′-3′ or 2′-5′ to 5′-2′; see U.S. Pat. Nos. 3,687,808; 4,469,863; 4,476,301; 5,023,243; 5,177,196; 5,188,897; 5,264,423; 5,276,019; 5,278,302; 5,286,717; 5,321,131; 5,399,676; 5,405,939; 5,453,496; 5,455,233; 5,466,677; 5,476,925; 5,519,126; 5,536,821; 5,541,306; 5,550,111; 5,563,253; 5,571,799; 5,587,361; and 5,625,050.

[0301] Any of the modified chemistries or formats of the antisense strand described herein can be combined with each other. For example, one, two, three, four, five, or more different types of modifications can be included within the same antisense strand.

[0302] In some embodiments, the sense strand comprises one or more modified nucleotides (e.g. 1, 2, 3, 4, 5, 6, 7, 8, 9, 10 or more). In some embodiments, the sense strand comprises one or more modified nucleotides and/or (e.g., and) one or more modified internucleotide linkages. In some embodiments, the modified nucleotide comprises a modified sugar moiety (e.g. a 2′ modified nucleotide). In some embodiments, the sense strand comprises one or more 2′ modified nucleotides, e.g., a 2′-deoxy, 2′-fluoro (2′-F), 2′-O-methyl (2′-O-Me), 2′-O-methoxyethyl (2′-MOE), 2′-O-aminopropyl (2′-O-AP), 2′-O-dimethylaminoethyl (2′-O-DMAOE), 2′-O-dimethylaminopropyl (2′-O-DMAP), 2′-O-dimethylaminoethyloxyethyl (2′-O-DMAEOE), or 2′-O—N-methylacetamido (2′-O-NMA). In some embodiments, each nucleotide of the sense strand is a modified nucleotide (e.g., a 2′-modified nucleotide). In some embodiments, the sense strand comprises one or more phosphorodiamidate morpholinos. In some embodiments, the sense strand is a phosphorodiamidate morpholino oligomer (PMO). In some embodiments, the sense strand comprises one or more 2′-O-methyl modified nucleotides. In some embodiments, the sense strand comprises one or more 2′-F modified nucleotides. In some embodiments, the sense strand comprises one or more 2′-O-methyl and 2′-F modified nucleotides.

[0303] In some embodiments, the sense strand contains a phosphorothioate or other modified internucleotide linkage. In some embodiments, the sense strand comprises phosphorothioate internucleoside linkages. In some embodiments, the sense strand comprises phosphorothioate internucleoside linkages between at least two nucleotides. In some embodiments, the sense strand comprises phosphorothioate internucleoside linkages between all nucleotides. For example, in some embodiments, the sense strand comprises modified internucleotide linkages at the first, second, and/or (e.g., and) third internucleoside linkage at the 5′ or 3′ end of the sense strand. In some embodiments, the sense strand comprises phosphodiester internucleoside linkage. In some embodiments, the sense strand does not comprise phosphorothioate internucleoside linkage. In some embodiments, the modified internucleotide linkages are phosphorus-containing linkages. In some embodiments, phosphorus-containing linkages that may be used include, but are not limited to, phosphorothioates, chiral phosphorothioates, phosphorodithioates, phosphotriesters, aminoalkylphosphotriesters, methyl and other alkyl phosphonates comprising 3′alkylene phosphonates and chiral phosphonates, phosphinates, phosphoramidates comprising 3′-amino phosphoramidate and aminoalkylphosphoramidates, thionophosphoramidates, thionoalkylphosphonates, thionoalkylphosphotriesters, and boranophosphates having normal 3′-5′ linkages, 2′-5′ linked analogs of these, and those having inverted polarity wherein the adjacent pairs of nucleoside units are linked 3′-5′ to 5′-3′ or 2′-5′ to 5′-2′; see U.S. Pat. Nos. 3,687,808; 4,469,863; 4,476,301; 5,023,243; 5,177,196; 5,188,897; 5,264,423; 5,276,019; 5,278,302; 5,286,717; 5,321,131; 5,399,676; 5,405,939; 5,453,496; 5,455,233; 5,466,677; 5,476,925; 5,519,126; 5,536,821; 5,541,306; 5,550,111; 5,563,253; 5,571,799; 5,587,361; and 5,625,050.

[0304] Any of the modified chemistries or formats of the sense strand described herein can be combined with each other. For example, one, two, three, four, five, or more different types of modifications can be included within the same sense strand.

[0305] In some embodiments, the antisense or sense strand of the siRNA molecule comprises modifications that enhance or reduce RNA-induced silencing complex (RISC) loading. In some embodiments, the antisense strand of the siRNA molecule comprises modifications that enhance RISC loading. In some embodiments, the sense strand of the siRNA molecule comprises modifications that reduce RISC loading and reduce off-target effects. In some embodiments, the antisense strand of the siRNA molecule comprises a 2′-O-methoxyethyl (2′-MOE) modification. The addition of the 2′-O-methoxyethyl (2′-MOE) group at the cleavage site improves both the specificity and silencing activity of siRNAs by facilitating the oriented RNA-induced silencing complex (RISC) loading of the modified strand, as described in Song et al., (2017) Mol Ther Nucleic Acids 9:242-250, incorporated herein by reference in its entirety. In some embodiments, the antisense strand of the siRNA molecule comprises a 2′-Ome-phosphorodithioate modification, which increases RISC loading as described in Wu et al., (2014) Nat Commun 5:3459, incorporated herein by reference in its entirety.

[0306] In some embodiments, the sense strand of the siRNA molecule comprises a 5′-morpholino, which reduces RISC loading of the sense strand and improves antisense strand selection and RNAi activity, as described in Kumar et al., (2019) Chem Commun (Camb) 55(35):5139-5142, incorporated herein by reference in its entirety. In some embodiments, the sense strand of the siRNA molecule is modified with a synthetic RNA-like high affinity nucleotide analogue, Locked Nucleic Acid (LNA), which reduces RISC loading of the sense strand and further enhances antisense strand incorporation into RISC, as described in Elman et al., (2005) Nucleic Acids Res. 33(1): 439-447, incorporated herein by reference in its entirety. In some embodiments, the sense strand of the siRNA molecule comprises a 5′ unlocked nucleic acic (UNA) modification, which reduce RISC loading of the sense strand and improve silencing potentcy of the antisense strand, as described in Snead et al., (2013) Mol Ther Nucleic Acids 2(7):e103, incorporated herein by reference in its entirety. In some embodiments, the sense strand of the siRNA molecule comprises a 5-nitroindole modification, which descresed the RNAi potency of the sense strand and reduces off-target effects as described in Zhang et al., (2012) Chembiochem 13(13):1940-1945, incorporated herein by reference in its entirety. In some embodiments, the sense strand comprises a 2′-O′methyl (2′-O-Me) modification, which reduces RISC loading and the off-target effects of the sense strand, as described in Zheng et al., FASEB (2013) 27(10): 4017-4026, incorporated herein by reference in its entirety. In some embodiments, the sense strand of the siRNA molecule is fully substituted with morpholino, 2′-MOE or 2′-O-Me residues, and are not recognized by RISC as described in Kole et al., (2012) Nature reviews. Drug Discovery 11(2):125-140, incorporated herein by reference in its entirety. In some embodiments the antisense strand of the siRNA molecule comprises a 2′-MOE modification and the sense strand comprises a 2′-O-Me modification (see e.g., Song et al., (2017) Mol Ther Nucleic Acids 9:242-250). In some embodiments at least one (e.g., at least 2, at least 3, at least 4, at least 5, at least 10) siRNA molecule is linked (e.g., covalently) to a muscle-targeting agent. In some embodiments, the muscle-targeting agent may comprise, or consist of, a nucleic acid (e.g., DNA or RNA), a peptide (e.g., an antibody), a lipid (e.g., a microvesicle), or a sugar moiety (e.g., a polysaccharide). In some embodiments, the muscle-targeting agent is an antibody. In some embodiments, the muscle-targeting agent is an anti-transferrin receptor antibody (e.g., any one of the anti-TfR antibodies provided in Tables 2-7). In some embodiments, the muscle-targeting agent may be linked to the 5′ end of the sense strand of the siRNA molecule. In some embodiments, the muscle-targeting agent may be linked to the 3′ end of the sense strand of the siRNA molecule. In some embodiments, the muscle-targeting agent may be linked internally to the sense strand of the siRNA molecule. In some embodiments, the muscle-targeting agent may be linked to the 5′ end of the antisense strand of the siRNA molecule. In some embodiments, the muscle-targeting agent may be linked to the 3′ end of the antisense strand of the siRNA molecule. In some embodiments, the muscle-targeting agent may be linked internally to the antisense strand of the siRNA molecule.

[0307] Non limiting examples of DUX4-targeting siRNAs are provided in Table 8.

TABLE 8
DUX4-targeting oligonucleotides^{†}

| | Target | | | | | |
|---|---|---|---|---|---|---|
| | start | | | SEQ | | SEQ |
| SIRNA | posi- | Target | | ID | Antisense | ID |
| No. | tion\hat{ } | Sequence | Sense strand | NO | strand | NO |
| 1 | 62 | GACGGAGA | Unmodified: | 2987 | Unmodified: | 3027 |
| | | CTCGTTTGG | GCGACGGAGACUCGUUUG | | GUCCAAACGAGUC | |
| | | AC (SEQ ID | GAC | | UCCGUCGCCG | |
| | | NO: 224) | Modified: | | Modified: | |
| | | | mGmCfGmAfCmGfGmAfGmA | | fGfUmCfCmAfAmAf | |
| | | | fCmUfCmGfUmUfUmGfGmAf | | CmGfAmGfUmCfUm | |
| | | | C | | CfCmGfUmCfGmC*f | |
| | | | | | C*mG | |
| 2 | 63 | ACGGAGAC | Unmodified: | 2988 | Unmodified: | 3028 |
| | | TCGTTTGGA | CGACGGAGACUCGUUUGG | | GGUCCAAACGAG | |
| | | CC | ACC | | UCUCCGUCGCC | |
| | | (SEQ ID NO: | Modified: | | Modified: | |
| | | 225) | mCmGfAmCfGmGfAmGfAmC | | fGfGmUfCmCfAmAf | |
| | | | fUmCfGmUfUmUfGmGfAmCf | | AmCfGmAfGmUfCm | |
| | | | C | | UfCmCfGmUfCmG*f | |
| | | | | | C*mC | |
| 3 | 64 | CGGAGACT | Unmodified: | 2989 | Unmodified: | 3029 |
| | | CGTTTGGAC | GACGGAGACUCGUUUGGA | | GGGUCCAAACGA | |
| | | CC | CCC | | GUCUCCGUCGC | |
| | | (SEQ ID NO: | Modified: | | Modified: | |
| | | 226) | mGmAfCmGfGmAfGmAfCmU | | fGfGmGfUmCfCmAf | |
| | | | fCmGfUmUfUmGfGmAfCmCf | | AmAfCmGfAmGfUm | |
| | | | C | | CfUmCfCmGfUmC*f | |
| | | | | | G*mC | |
| 4 | 99 | CCTGCGAG | Unmodified: | 2990 | Unmodified: | 3030 |
| | | CCTGCTTTG | GCCCUGCGAGCCUGCUUU | | CUCAAAGCAGGCU | |
| | | AG | GAG | | CGCAGGGCCU | |
| | | (SEQ ID NO: | Modified: | | Modified: | |
| | | 261) | mGmCfCmCfUmGfCmGfAmG | | fCfUmCfAmAfAmGf | |
| | | | fCmCfUmGfCmUfUmUfGmAf | | CmAfGmGfCmUfCm | |
| | | | G | | GfCmAfGmGfGmC*f | |
| | | | | | C*mU | |
| 5 | 103 | CGAGCCTG | Unmodified: | 2991 | Unmodified: | 3031 |
| | | CTTTGAGCG | UGCGAGCCUGCUUUGAGC | | UCCGCUCAAAGCA | |
| | | GA | GGA | | GGCUCGCAGG | |
| | | (SEQ ID NO: | Modified: | | Modified: | |
| | | 265) | mUmGfCmGfAmGfCmCfUmG | | fUfCmCfGmCfUmCf | |
| | | | fCmUfUmUfGmAfGmCfGmGf | | AmAfAmGfCmAfGm | |
| | | | A | | GfCmUfCmGfCmA*f | |
| | | | | | G*mG | |
| 6 | 158 | CCCAGGCC | Unmodified: | 2992 | Unmodified: | 3032 |
| | | ATCGGCATT | GGCCCAGGCCAUCGGCAU | | GGAAUGCCGAUG | |
| | | CC | UCC | | GCCUGGGCCAG | |
| | | (SEQ ID NO: | Modified: | | Modified: | |
| | | 320) | mGmGfCmCfCmAfGmGfCmCf | | fGfGmAfAmUfGmCf | |
| | | | AmUfCmGfGmCfAmUfUmCfC | | CmGfAmUfGmGfCm | |
| | | | | | CfUmGfGmGfCmC*f | |
| | | | | | A*mG | |
| 7 | 179 | AGCCCAGG | Unmodified: | 2993 | Unmodified: | 3033 |
| | | GTCCAGATT | GGAGCCCAGGGUCCAGAU | | CAAAUCUGGACCC | |
| | | TG | UUG | | UGGGCUCCGG | |
| | | (SEQ ID NO: | Modified: | | Modified: | |
| | | 341) | mGmGfAmGfCmCfCmAfGmG | | fCfAmAfAmUfCmUf | |
| | | | fGmUfCmCfAmGfAmUfUmUf | | GmGfAmCfCmCfUm | |
| | | | G | | GfGmGfCmUfCmC*f | |
| | | | | | G*mG | |
| 8 | 181 | CCCAGGGT | Unmodified: | 2994 | Unmodified: | 3034 |
| | | CCAGATTTG | AGCCCAGGGUCCAGAUUU | | ACCAAAUCUGGAC | |
| | | GT | GGU | | CCUGGGCUCC | |
| | | (SEQ ID NO: | Modified: | | Modified: | |
| | | 343) | mAmGfCmCfCmAfGmGfGmU | | fAfCmCfAmAfAmUf | |
| | | | fCmCfAmGfAmUfUmUfGmGf | | CmUfGmGfAmCfCm | |
| | | | U | | CfUmGfGmGfCmU*f | |
| | | | | | C*mC | |
| 9 | 194 | TTTGGTTTC | Unmodified: | 2995 | Unmodified: | 3035 |
| | | AGAATGAG | GAUUUGGUUUCAGAAUGA | | CUCUCAUUCUGAA | |
| | | AG | GAG | | ACCAAAUCUG | |
| | | (SEQ ID NO: | Modified: | | Modified: | |
| | | 356) | mGmAfUmUfUmGfGmUfUmU | | fCfUmCfUmCfAmUf | |
| | | | fCmAfGmAfAmUfGmAfGmAf | | UmCfUmGfAmAfAm | |
| | | | G | | CfCmAfAmAfUmC*f | |
| | | | | | U*mG | |
| 10 | 226 | AGGCAGCA | Unmodified: | 2996 | Unmodified: | 3036 |
| | | CCGGCGGG | UGAGGCAGCACCGGCGGG | | AUUCCCGCCGGUG | |
| | | AAT | AAU | | CUGCCUCAGC | |
| | | (SEQ ID NO: | Modified: | | Modified: | |
| | | 388) | mUmGfAmGfGmCfAmGfCmA | | fAfUmUfCmCfCmGf | |
| | | | fCmCfGmGfCmGfGmGfAmAf | | CmCfGmGfUmGfCm | |
| | | | U | | UfGmCfCmUfCmA*f | |
| | | | | | G*mC | |
| 11 | 304 | ACCGGATC | Unmodified: | 2997 | Unmodified: | 3037 |
| | | CCAGACCG | UCACCGGAUCCCAGACCGC | | GGGCGGUCUGGG | |
| | | CCC | CC | | AUCCGGUGACG | |
| | | (SEQ ID | Modified: | | Modified: | |
| | | NO:466) | mUmCfAmCfCmGfGmAfUmC | | fGfGmGfCmGfGmUf | |
| | | | fCmCfAmGfAmCfCmGfCmCf | | CmUfGmGfGmAfUm | |
| | | | C | | CfCmGfGmUfGmA*f | |
| | | | | | C*mG | |
| 12 | 321 | CCTGCTCCT | Unmodified: | 2998 | Unmodified: | 3038 |
| | | CCGAGCCTT | GCCCUGCUCCUCCGAGCCU | | AAAGGCUCGGAG | |
| | | T | UU | | GAGCAGGGCGG | |
| | | (SEQ ID NO: | Modified: | | Modified: | |
| | | 483) | mGmCfCmCfUmGfCmUfCmCf | | fAfAmAfGmGfCmUf | |
| | | | UmCfCmGfAmGfCmCfUmUfU | | CmGfGmAfGmGfAm | |
| | | | | | GfCmAfGmGfGmC*f | |
| | | | | | G*mG | |
| 13 | 332 | GAGCCTTTG | Unmodified: | 2999 | Unmodified: | 3039 |
| | | AGAAGGAT | CCGAGCCUUUGAGAAGGA | | CGAUCCUUCUCAA | |
| | | CG | UCG | | AGGCUCGGAG | |
| | | (SEQ ID | Modified: | | Modified: | |
| | | NO:494) | mCmCfGmAfGmCfCmUfUmU | | fCfGmAfUmCfCmUf | |
| | | | fGmAfGmAfAmGfGmAfUmCf | | UmCfUmCfAmAfAm | |
| | | | G | | GfGmCfUmCfGmG*f | |
| | | | | | A*mG | |
| 14 | 339 | TGAGAAGG | Unmodified: | 3000 | Unmodified: | 3040 |
| | | ATCGCTTTC | UUUGAGAAGGAUCGCUUU | | UGGAAAGCGAUC | |
| | | CA | CCA | | CUUCUCAAAGG | |
| | | (SEQ ID NO: | Modified: | | Modified: | |
| | | 501) | mUmUfUmGfAmGfAmAfGmG | | fUfGmGfAmAfAmGf | |
| | | | fAmUfCmGfCmUfUmUfCmCf | | CmGfAmUfCmCfUm | |
| | | | A | | UfCmUfCmAfAmA*f | |
| | | | | | G*mG | |
| 15 | 347 | ATCGCTTTC | Unmodified: | 3001 | Unmodified: | 3041 |
| | | CAGGCATC | GGAUCGCUUUCCAGGCAU | | GCGAUGCCUGGA | |
| | | GC | CGC | | AAGCGAUCCUU | |
| | | (SEQ ID NO: | Modified: | | Modified: | |
| | | 509) | mGmGfAmUfCmGfCmUfUmU | | fGfCmGfAmUfGmCf | |
| | | | fCmCfAmGfGmCfAmUfCmGf | | CmUfGmGfAmAfAm | |
| | | | C | | GfCmGfAmUfCmC*f | |
| | | | | | U*mU | |
| 16 | 390 | GACGGGCC | Unmodified: | 3002 | Unmodified: | 3042 |
| | | TCCCGGAGT | GAGACGGGCCUCCCGGAG | | GGACUCCGGGAG | |
| | | CC | UCC | | GCCCGUCUCUC | |
| | | (SEQ ID NO: | Modified: | | Modified: | |
| | | 552) | mGmAfGmAfCmGfGmGfCmC | | fGfGmAfCmUfCmCf | |
| | | | fUmCfCmCfGmGfAmGfUmCf | | GmGfGmAfGmGfCm | |
| | | | C | | CfCmGfUmCfUmC*f | |
| | | | | | U*mC | |
| 17 | 398 | TCCCGGAGT | Unmodified: | 3003 | Unmodified: | 3043 |
| | | CCAGGATTC | CCUCCCGGAGUCCAGGAU | | UGAAUCCUGGAC | |
| | | A | UCA | | UCCGGGAGGCC | |
| | | (SEQ ID NO: | Modified: | | Modified: | |
| | | 560) | mCmCfUmCfCmCfGmGfAmGf | | fUfGmAfAmUfCmCf | |
| | | | UmCfCmAfGmGfAmUfUmCf | | UmGfGmAfCmUfCm | |
| | | | A | | CfGmGfGmAfGmG*f | |
| | | | | | C*mC | |
| 18 | 399 | CCCGGAGT | Unmodified: | 3004 | Unmodified: | 3044 |
| | | CCAGGATTC | CUCCCGGAGUCCAGGAUU | | CUGAAUCCUGGAC | |
| | | AG | CAG | | UCCGGGAGGC | |
| | | (SEQ ID NO: | Modified: | | Modified: | |
| | | 561) | mCmUfCmCfCmGfGmAfGmU | | fCfUmGfAmAfUmCf | |
| | | | fCmCfAmGfGmAfUmUfCmAf | | CmUfGmGfAmCfUm | |
| | | | G | | CfCmGfGmGfAmG*f | |
| | | | | | G*mC | |
| 19 | 439 | GCCAGGCA | Unmodified: | 3005 | Unmodified: | 3045 |
| | | CCCGGGAC | GGGCCAGGCACCCGGGAC | | CCUGUCCCGGGUG | |
| | | AGG | AGG | | CCUGGCCCUU | |
| | | (SEQ ID NO: | Modified: | | Modified: | |
| | | 601) | mGmGfGmCfCmAfGmGfCmA | | fCfCmUfGmUfCmCf | |
| | | | fCmCfCmGfGmGfAmCfAmGf | | CmGfGmGfUmGfCm | |
| | | | G | | CfUmGfGmCfCmC*f | |
| | | | | | U*mU | |
| 20 | 759 | CCCTCAGGC | Unmodified: | 3006 | Unmodified: | 3046 |
| | | TCCTCGCTG | CACCCUCAGGCUCCUCGCU | | CCAGCGAGGAGCC | |
| | | G | GG | | UGAGGGUGGG | |
| | | (SEQ ID NO: | Modified: | | Modified: | |
| | | 921) | mCmAfCmCfCmUfCmAfGmGf | | fCfCmAfGmCfGmAf | |
| | | | CmUfCmCfUmCfGmCfUmGfG | | GmGfAmGfCmCfUm | |
| | | | | | GfAmGfGmGfUmG* | |
| | | | | | fG*mG | |
| 21 | 780 | TCCGCACCC | Unmodified: | 3007 | Unmodified: | 3047 |
| | | GGGCAAAA | CCUCCGCACCCGGGCAAAA | | GCUUUUGCCCGGG | |
| | | GC | GC | | UGCGGAGGCC | |
| | | (SEQ ID NO: | Modified: | | Modified: | |
| | | 942) | mCmCfUmCfCmGfCmAfCmCf | | fGfCmUfUmUfUmGf | |
| | | | CmGfGmGfCmAfAmAfAmGf | | CmCfCmGfGmGfUm | |
| | | | C | | GfCmGfGmAfGmG*f | |
| | | | | | C*mC | |
| 22 | 791 | GCAAAAGC | Unmodified: | 3008 | Unmodified: | 3048 |
| | | CGGGAGGA | GGGCAAAAGCCGGGAGGA | | CGGUCCUCCCGGC | |
| | | CCG | CCG | | UUUUGCCCGG | |
| | | (SEQ ID NO: | Modified: | | Modified: | |
| | | 953) | mGmGfGmCfAmAfAmAfGmC | | fCfGmGfUmCfCmUf | |
| | | | fCmGfGmGfAmGfGmAfCmCf | | CmCfCmGfGmCfUm | |
| | | | G | | UfUmUfGmCfCmC*f | |
| | | | | | G*mG | |
| 23 | 1132 | CTGGCGAG | Unmodified: | 3009 | Unmodified: | 3049 |
| | | CCCGGAGTT | UCCUGGCGAGCCCGGAGU | | GAAACUCCGGGCU | |
| | | TC | UUC | | CGCCAGGAGC | |
| | | (SEQ ID | Modified: | | Modified: | |
| | | NO:1294) | mUmCfCmUfGmGfCmGfAmG | | fGfAmAfAmCfUmCf | |
| | | | fCmCfCmGfGmAfGmUfUmUf | | CmGfGmGfCmUfCm | |
| | | | C | | GfCmCfAmGfGmA*f | |
| | | | | | G*mC | |
| 24 | 1134 | GGCGAGCC | Unmodified: | 3010 | Unmodified: | 3050 |
| | | CGGAGTTTC | CUGGCGAGCCCGGAGUUU | | CAGAAACUCCGGG | |
| | | TG | CUG | | CUCGCCAGGA | |
| | | (SEQ ID NO: | Modified: | | Modified: | |
| | | 1296) | mCmUfGmGfCmGfAmGfCmC | | fCfAmGfAmAfAmCf | |
| | | | fCmGfGmAfGmUfUmUfCmUf | | UmCfCmGfGmGfCm | |
| | | | G | | UfCmGfCmCfAmG*f | |
| | | | | | G*mA | |
| 25 | 1139 | GCCCGGAG | Unmodified: | 3011 | Unmodified: | 3051 |
| | | TTTCTGCAG | GAGCCCGGAGUUUCUGCA | | UGCUGCAGAAAC | |
| | | CA | GCA | | UCCGGGCUCGC | |
| | | (SEQ ID NO: | Modified: | | Modified: | |
| | | 1301) | mGmAfGmCfCmCfGmGfAmG | | fUfGmCfUmGfCmAf | |
| | | | fUmUfUmCfUmGfCmAfGmCf | | GmAfAmAfCmUfCm | |
| | | | A | | CfGmGfGmCfUmC*f | |
| | | | | | G*mC | |
| 26 | 1158 | GGCGCAAC | Unmodified: | 3012 | Unmodified: | 3052 |
| | | CTCTCCTAG | CAGGCGCAACCUCUCCUAG | | UUCUAGGAGAGG | |
| | | AA | AA | | UUGCGCCUGCU | |
| | | (SEQ ID NO: | Modified: | | Modified: | |
| | | 1320) | mCmAfGmGfCmGfCmAfAmC | | fUfUmCfUmAfGmGf | |
| | | | fCmUfCmUfCmCfUmAfGmAf | | AmGfAmGfGmUfUm | |
| | | | A | | GfCmGfCmCfUmG*f | |
| | | | | | C*mU | |
| 27 | 1159 | GCGCAACC | Unmodified: | 3013 | Unmodified: | 3053 |
| | | TCTCCTAGA | AGGCGCAACCUCUCCUAG | | UUUCUAGGAGAG | |
| | | AA | AAA | | GUUGCGCCUGC | |
| | | (SEQ ID NO: | Modified: | | Modified: | |
| | | 1321) | mAmGfGmCfGmCfAmAfCmC | | fUfUmUfCmUfAmGf | |
| | | | fUmCfUmCfCmUfAmGfAmAf | | GmAfGmAfGmGfUm | |
| | | | A | | UfGmCfGmCfCmU*f | |
| | | | | | G*mC | |
| 28 | 1160 | CGCAACCTC | Unmodified: | 3014 | Unmodified: | 3054 |
| | | TCCTAGAA | GGCGCAACCUCUCCUAGA | | GUUUCUAGGAGA | |
| | | AC | AAC | | GGUUGCGCCUG | |
| | | (SEQ ID NO: | Modified: | | Modified: | |
| | | 1322) | mGmGfCmGfCmAfAmCfCmU | | fGfUmUfUmCfUmAf | |
| | | | fCmUfCmCfUmAfGmAfAmAf | | GmGfAmGfAmGfGm | |
| | | | C | | UfUmGfCmGfCmC*f | |
| | | | | | U*mG | |
| 29 | 1161 | GCAACCTCT | Unmodified: | 3015 | Unmodified: | 3055 |
| | | CCTAGAAA | GCGCAACCUCUCCUAGAA | | CGUUUCUAGGAG | |
| | | CG | ACG | | AGGUUGCGCCU | |
| | | (SEQ ID NO: | Modified | | Modified: | |
| | | 1323) | mGmCfGmCfAmAfCmCfUmCf | | fCfGmUfUmUfCmUf | |
| | | | UmCfCmUfAmGfAmAfAmCf | | AmGfGmAfGmAfGm | |
| | | | G | | GfUmUfGmCfGmC*f | |
| | | | | | C*mU | |
| 30 | 1162 | CAACCTCTC | Unmodified: | 3016 | Unmodified: | 3056 |
| | | CTAGAAAC | CGCAACCUCUCCUAGAAAC | | CCGUUUCUAGGA | |
| | | GG | GG | | GAGGUUGCGCC | |
| | | (SEQ ID NO: | Modified: | | Modified: | |
| | | 1324) | mCmGfCmAfAmCfCmUfCmUf | | fCfCmGfUmUfUmCf | |
| | | | CmCfUmAfGmAfAmAfCmGf | | UmAfGmGfAmGfAm | |
| | | | G | | GfGmUfUmGfCmG*f | |
| | | | | | C*mC | |
| 31 | 1163 | AACCTCTCC | Unmodified: | 3017 | Unmodified: | 3057 |
| | | TAGAAACG | GCAACCUCUCCUAGAAAC | | UCCGUUUCUAGG | |
| | | GA | GGA | | AGAGGUUGCGC | |
| | | (SEQ ID NO: | Modified: | | Modified: | |
| | | 1325) | mGmCfAmAfCmCfUmCfUmCf | | fUfCmCfGmUfUmUf | |
| | | | CmUfAmGfAmAfAmCfGmGf | | CmUfAmGfGmAfGm | |
| | | | A | | AfGmGfUmUfGmC*f | |
| | | | | | G*mC | |
| 32 | 1211 | AGGCCGCC | Unmodified: | 3018 | Unmodified: | 3058 |
| | | TCGCTGGA | AGAGGCCGCCUCGCUGGA | | GCUUCCAGCGAGG | |
| | | AGC | AGC | | CGGCCUCUUC | |
| | | (SEQ ID NO: | Modified: | | Modified: | |
| | | 1373) | mAmGfAmGfGmCfCmGfCmC | | fGfCmUfUmCfCmAf | |
| | | | fUmCfGmCfUmGfGmAfAmGf | | GmCfGmAfGmGfCm | |
| | | | C | | GfGmCfCmUfCmU*f | |
| | | | | | U*mC | |
| 33 | 1232 | CCCTCAGCG | Unmodified: | 3019 | Unmodified: | 3059 |
| | | AGGAAGAA | ACCCCUCAGCGAGGAAGA | | UAUUCUUCCUCGC | |
| | | TA | AUA | | UGAGGGGUGC | |
| | | (SEQ ID NO: | Modified: | | Modified: | |
| | | 1394) | mAmCfCmCfCmUfCmAfGmCf | | fUfAmUfUmCfUmUf | |
| | | | GmAfGmGfAmAfGmAfAmUf | | CmCfUmCfGmCfUm | |
| | | | A | | GfAmGfGmGfGmU* | |
| | | | | | fG*mC | |
| 34 | 1233 | CCTCAGCG | Unmodified: | 3020 | Unmodified: | 3060 |
| | | AGGAAGAA | CCCCUCAGCGAGGAAGAA | | GUAUUCUUCCUCG | |
| | | TAC | UAC | | CUGAGGGGUG | |
| | | (SEQ ID NO: | Modified: | | Modified: | |
| | | 1395) | mCmCfCmCfUmCfAmGfCmGf | | fGfUmAfUmUfCmUf | |
| | | | AmGfGmAfAmGfAmAfUmAf | | UmCfCmUfCmGfCm | |
| | | | C | | UfGmAfGmGfGmG* | |
| | | | | | fU*mG | |
| 35 | 1236 | CAGCGAGG | Unmodified: | 3021 | Unmodified: | 3061 |
| | | AAGAATAC | CUCAGCGAGGAAGAAUAC | | CCGGUAUUCUUCC | |
| | | CGG | CGG | | UCGCUGAGGG | |
| | | (SEQ ID NO: | Modified: | | Modified: | |
| | | 1398) | mCmUfCmAfGmCfGmAfGmG | | fCfCmGfGmUfAmUf | |
| | | | fAmAfGmAfAmUfAmCfCmGf | | UmCfUmUfCmCfUm | |
| | | | G | | CfGmCfUmGfAmG*f | |
| | | | | | G*mG | |
| 36 | 1423 | TAGGCCCG | Unmodified: | 3022 | Unmodified: | 3062 |
| | | GTGAGAGA | UCUAGGCCCGGUGAGAGA | | GAGUCUCUCACCG | |
| | | CTC | CUC | | GGCCUAGACC | |
| | | (SEQ ID NO: | Modified: | | Modified: | |
| | | 1523) | mUmCfUmAfGmGfCmCfCmG | | fGfAmGfUmCfUmCf | |
| | | | fGmUfGmAfGmAfGmAfCmUf | | UmCfAmCfCmGfGm | |
| | | | C | | GfCmCfUmAfGmA*f | |
| | | | | | C*mC | |
| 37 | 1431 | GTGAGAGA | Unmodified: | 3023 | Unmodified: | 3063 |
| | | CTCCACACC | CGGUGAGAGACUCCACAC | | GCGGUGUGGAGU | |
| | | GC | CGC | | CUCUCACCGGG | |
| | | (SEQ ID NO: | Modified: | | Modified: | |
| | | 1531) | mCmGfGmUfGmAfGmAfGmA | | fGfCmGfGmUfGmUf | |
| | | | fCmUfCmCfAmCfAmCfCmGf | | GmGfAmGfUmCfUm | |
| | | | C | | CfUmCfAmCfCmG*f | |
| | | | | | G*mG | |
| 38 | 1448 | GCGGAGAA | Unmodified: | 3024 | Unmodified: | 3064 |
| | | CTGCCATTC | CCGCGGAGAACUGCCAUU | | AAGAAUGGCAGU | |
| | | TT | CUU | | UCUCCGCGGUG | |
| | | (SEQ ID NO: | Modified: | | Modified: | |
| | | 1548) | mCmCfGmCfGmGfAmGfAmA | | fAfAmGfAmAfUmGf | |
| | | | fCmUfGmCfCmAfUmUfCmUf | | GmCfAmGfUmUfCm | |
| | | | U | | UfCmCfGmCfGmG*f | |
| | | | | | U*mG | |
| 39 | 1458 | GCCATTCTT | Unmodified: | 3025 | Unmodified: | 3065 |
| | | TCCTGGGCA | CUGCCAUUCUUUCCUGGG | | AUGCCCAGGAAA | |
| | | T | CAU | | GAAUGGCAGUU | |
| | | (SEQ ID NO: | Modified: | | Modified: | |
| | | 1558) | mCmUfGmCfCmAfUmUfCmU | | fAfUmGfCmCfCmAf | |
| | | | fUmUfCmCfUmGfGmGfCmAf | | GmGfAmAfAmGfAm | |
| | | | U | | AfUmGfGmCfAmG*f | |
| | | | | | U*mU | |
| 40 | 1461 | ATTCTTTCC | Unmodified: | 3026 | Unmodified: | 3066 |
| | | TGGGCATCC | CCAUUCUUUCCUGGGCAU | | GGGAUGCCCAGG | |
| | | C | CCC | | AAAGAAUGGCA | |
| | | (SEQ ID NO: | Modified: | | Modified: | |
| | | 1561) | mCmCfAmUfUmCfUmUfUmC | | fGfGmGfAmUfGmCf | |
| | | | fCmUfGmGfGmCfAmUfCmCf | | CmCfAmGfGmAfAm | |
| | | | C | | AfGmAfAmUfGmG* | |
| | | | | | fC*mA | |

“m” indicates a 2′-O-methyl (2′-O-Me) modified nucleoside; “f” indicates a 2′-fluoro (2′-F) modified nucleoside; “*” indicates phosphorothioate internucleoside linkage; and the absence of “*” between two nucleosides indicate phosphodiester internucleoside linkage.
^{†}Each uracil base (U) in any one of the oligonucleotides and/or target sequences provided in Table 8 may independently and optionally be replaced with a thymine base (T), and/or each T may independently and optionally be replaced with a U.
Target sequences listed in Table 8 contain T's, but binding of a DUX4-targeting
oligonucleotide to RNA and/or DNA is contemplated.
\hat{ }Target sequence start position is in NM_001293798.2 (SEQ ID NO: 160)

[0308] Additional non-limiting examples of further modified DUX4-targeting siRNAs are provided in Table 9.

TABLE 9
Additional DUX4-targeting oligonucleotides^{†}

| | Target | | | | | |
|---|---|---|---|---|---|---|
| | start | | | SEQ | | SEQ |
| SIRNA | posi- | Target | | ID | | ID |
| No. | tion\hat{ } | Sequence | Sense strand | NO | Antisense strand | NO |
| 41 | 62 | GACGGAGA | Unmodified: | 2987 | Unmodified: | 3027 |
| | | CTCGTTTGG | GCGACGGAGACUCGUUUG | | GUCCAAACGAGUCUCC | |
| | | AC | GAC | | GUCGCCG | |
| | | (SEQ ID | Modified: | | Modified: | |
| | | NO: 224) | mGmxCfGmAfxCmGfGmAfG | | fGfUmCfCmAfAmAfxCm | |
| | | | mAfCmUfxCmGfUmUfUmGfG | | GfAmGfUmCfUmCfxCmG | |
| | | | mAfC | | fUmxCfGmC*fxC*mG | |
| 42 | 304 | ACCGGATC | Unmodified: | | Unmodified: | 3037 |
| | | CCAGACCG | UCACCGGAUCCCAGACCGC | | GGGCGGUCUGGGAUCC | |
| | | CCC | CC | | GGUGACG | |
| | | (SEQ ID | Modified: | 2997 | Modified: | |
| | | NO:466) | mUmCfAmCfxCmGfGmAfUm | | fGfGmGfxCmGfGmUfCm | |
| | | | CfCmCfAmGfAmCfxCmGfCm | | UfGmGfGmAfUmCfxCmG | |
| | | | CfC | | fGmUfGmA*fxC*mG | |
| 43 | 332 | GAGCCTTTG | Unmodified: | 2999 | Unmodified: | 3039 |
| | | AGAAGGAT | CCGAGCCUUUGAGAAGGA | | CGAUCCUUCUCAAAGG | |
| | | CG | UCG | | CUCGGAG | |
| | | (SEQ ID | Modified: | | Modified: | |
| | | NO:494) | mCmxCfGmAfGmCfCmUfUm | | fxCfGmAfUmCfCmUfUm | |
| | | | UfGmAfGmAfAmGfGmAfUmx | | CfUmCfAmAfAmGfGmCf | |
| | | | CfG | | UmxCfGmG*fA*mG | |
| 44 | 339 | TGAGAAGG | Unmodified: | 3000 | Unmodified: | 3040 |
| | | ATCGCTTTC | UUUGAGAAGGAUCGCUUU | | UGGAAAGCGAUCCUUC | |
| | | CA | CCA | | UCAAAGG | |
| | | (SEQ ID NO: | Modified: | | Modified: | |
| | | 501) | mUmUfUmGfAmGfAmAfGmG | | fUfGmGfAmAfAmGfxCm | |
| | | | fAmUfxCmGfCmUfUmUfCmC | | GfAmUfCmCfUmUfCmUf | |
| | | | fA | | CmAfAmA*fG*mG | |
| 45 | 347 | ATCGCTTTC | Unmodified: | 3001 | Unmodified: | 3041 |
| | | CAGGCATC | GGAUCGCUUUCCAGGCAU | | GCGAUGCCUGGAAAGC | |
| | | GC | CGC | | GAUCCUU | |
| | | (SEQ ID NO: | Modified: | | Modified: | |
| | | 509) | mGmGfAmUfxCmGfCmUfUm | | fGfxCmGfAmUfGmCfCm | |
| | | | UfCmCfAmGfGmCfAmUfxCm | | UfGmGfAmAfAmGfxCmG | |
| | | | GfC | | fAmUfCmC*fU*mU | |
| 46 | 399 | CCCGGAGT | Unmodified: | 3004 | Unmodified: | 3044 |
| | | CCAGGATTC | CUCCCGGAGUCCAGGAUU | | CUGAAUCCUGGACUCC | |
| | | AG | CAG | | GGGAGGC | |
| | | (SEQ ID NO: | Modified: | | Modified: | |
| | | 561) | mCmUfCmCfxCmGfGmAfGm | | fCfUmGfAmAfUmCfCmU | |
| | | | UfCmCfAmGfGmAfUmUfCm | | fGmGfAmCfUmCfxCmGf | |
| | | | AfG | | GmGfAmG*fG*mC | |
| 47 | 1158 | GGCGCAAC | Unmodified: | 3012 | Unmodified: | 3052 |
| | | CTCTCCTAG | CAGGCGCAACCUCUCCUAG | | UUCUAGGAGAGGUUG | |
| | | AA | AA | | CGCCUGCU | |
| | | (SEQ ID NO: | Modified: | | Modified: | |
| | | 1320) | mCmAfGmGfxCmGfCmAfAm | | fUfUmCfUmAfGmGfAmG | |
| | | | CfCmUfCmUfCmCfUmAfGmA | | fAmGfGmUfUmGfxCmGf | |
| | | | fA | | CmCfUmG*fC*mU | |
| 48 | 1236 | CAGCGAGG | Unmodified: | 3021 | Unmodified: | 3061 |
| | | AAGAATAC | CUCAGCGAGGAAGAAUAC | | CCGGUAUUCUUCCUCG | |
| | | CGG | CGG | | CUGAGGG | |
| | | (SEQ ID NO: | Modified: | | Modified: | |
| | | 1398) | mCmUfCmAfGmxCfGmAfGm | | fCfxCmGfGmUfAmUfUm | |
| | | | GfAmAfGmAfAmUfAmCfxCm | | CfUmUfCmCfUmxCfGmC | |
| | | | GfG | | fUmGfAmG*fG*mG | |

“m” indicates a 2′-O-methyl (2′-O-Me) modified nucleoside; “f” indicates a 2′-fluoro (2′-F) modified nucleoside; “mxC” indicates 2′-O-Me modified 5-methyl-cytidine; “fxC” indicates 2′-F modified 5-methyl- cytidine; “*” indicates phosphorothioate internucleoside linkage; and the absence of “*” between two nucleosides indicate phosphodiester internucleoside linkage.
^{†}Each uracil base (U) in any one of the oligonucleotides and/or target sequences provided in Table 8 may independently and optionally be replaced with a thymine base (T), and/or each T may independently and optionally be replaced with a U.
Target sequences listed in Table 9 contain T's, but binding of a DUX4-targeting oligonucleotide to RNA and/or DNA is contemplated.
\hat{ }Target sequence start position is in NM_001293798.2 (SEQ ID NO: 160)

[0309] In some embodiments, a DUX4-targeting oligonucleotide comprises an antisense strand that is 18-25 nucleosides (e.g., 18, 19, 20, 21, 22, 23, 24, or 25 nucleosides) in length and comprises a region of complementarity to a target sequence as set forth in any one of SEQ TD NOs: 224-226, 261, 265, 320, 341, 343, 356, 388, 466, 483, 494, 501, 509, 552, 560, 561, 601, 921, 942, 953, 1294, 1296, 1301, 1320-1325, 1373, 1394, 1395, 1398, 1523, 1531, 1548, 1558, and 1561, wherein the region of complementarity is at least 16 nucleotides (e.g., 16, 17, 18, or 19 nucleotides) in length. In some embodiments, the antisense strand is 21 nucleotides in length and comprises a region of complementarity to a target sequence as set forth in any one of SEQ TD NOs: 224-226, 261, 265, 320, 341, 343, 356, 388, 466, 483, 494, 501, 509, 552, 560, 561, 601, 921, 942, 953, 1294, 1296, 1301, 1320-1325, 1373, 1394, 1395, 1398, 1523, 1531, 1548, 1558, and 1561, wherein the region of complementarity is 19 nucleotides in length. In some embodiments, the region of complementarity is fully complementarity with all or a portion of its target sequence. In some embodiments, the region of complementarity includes 1, 2, 3 or more mismatches.

[0310] In some embodiments, a DUX4-targeting oligonucleotide comprises an antisense strand that comprises at least 15 consecutive nucleosides of (e.g., at least 15, at least 16, at least 17, at least 18, at least 19, or at least 20) the nucleotide sequence of any one of SEQ ID NOs: 3027-3066. In some embodiments, a DUX4 targeting oligonucleotide further comprises a sense strand that comprises at least 15 consecutive nucleosides of (e.g., at least 15, at least 16, at least 17, at least 18, at least 19, or at least 20) the nucleotide sequence of any one of SEQ ID NOs: 2987-3026.

[0311] In some embodiments, a DUX4-targeting oligonucleotide comprises an antisense strand that comprises the nucleotide sequence of any one of SEQ ID NOs: 3027-3066. In some embodiments, a DUX4 targeting oligonucleotide further comprises a sense strand that comprises the nucleotide sequence of any one of SEQ ID NOs: 2987-3026.

[0312] In some embodiments, a DUX4-targeting oligonucleotide is a double stranded oligonucleotide (e.g., an siRNA) comprising an antisense strand that comprises the nucleotide sequence of any one of SEQ ID NOs: 3027-3066 and a sense strand that hybridizes to the antisense strand and comprises the nucleotide sequence of any one of SEQ ID NOs: 2987-3026, wherein the antisense strand and/or (e.g., and) comprises one or more modified nucleosides (e.g., 2′-modified nucleosides). In some embodiment, the one or more modified nucleosides are selected from 2′-O-Me and 2′-F modified nucleosides.

[0313] In some embodiments, a DUX4-targeting oligonucleotide is a double stranded oligonucleotide (e.g., an siRNA) comprising an antisense strand that comprises the nucleotide sequence of any one of SEQ ID NOs: 3027-3066 and a sense strand that hybridizes to the antisense strand and comprises the nucleotide sequence of any one of SEQ ID NOs: 2987-3026, wherein each nucleoside in the antisense strand and/or (e.g., and) each nucleoside in the sense strand is a 2′-modified nucleoside selected from 2′-O-Me and 2′-F modified nucleosides.

[0314] In some embodiments, a DUX4-targeing oligonucleotide is a double stranded oligonucleotide (e.g., an siRNA) comprising an antisense strand that comprises the nucleotide sequence of any one of SEQ ID NOs: 3027-3066 and a sense strand that hybridizes to the antisense strand and comprises the nucleotide sequence of any one of SEQ ID NOs: 2987-3026, wherein each nucleoside in the antisense strand and each nucleoside in the sense strand is a 2′-modified nucleoside selected from 2′-O-Me and 2′-F modified nucleosides, and wherein the antisense strand and/or (e.g., and) the sense strand each comprises one or more phosphorothioate internucleoside linkages. In some embodiments, the sense strand does not comprise any phosphorothioate internucleoside linkages (all the internucleoside linkages in the sense strand are phosphodiester internucleoside linkages), and the antisense strand comprises 1, 2, or 3 phosphorothioate internucleoside linkages. In some embodiments, the antisense strand comprises 2 phosphorothioate internucleoside linkages, optionally wherein the two internucleoside linkages at the 3′ end of the antisense strand are phosphorothioate internucleoside linkages and the rest of the internucleoside linkages in the antisense strand are phosphodiester internucleoside linkages.

[0315] In some embodiments, the antisense strand of the DUX4-targeting oligonucleotide comprises a structure of (5′ to 3′): fNfNmNfNmNfNmNfNmNfNmNfNmNfNmNfNmNfNmNfNmN*fN*mN, wherein “mN” indicates 2′-O-methyl (2′-O-Me) modified nucleosides; “fN” indicates 2′-fluoro (2′-F) modified nucleosides; “*” indicates phosphorothioate internucleoside linkage; and the absence of “*” between two nucleosides indicate phosphodiester internucleoside linkage.

[0316] In some embodiments, the sense strand of the DUX4-targeting oligonucleotide comprises a structure of (5′ to 3′): mNmNfNmNfNmNfNmNfNmNfNmNfNmNfNmNfNmNfNmNfN, wherein “mN” indicates 2′-O-methyl (2′-O-Me) modified nucleosides; “fN” indicates 2′-fluoro (2′-F) modified nucleosides; and the absence of “*” between two nucleosides indicate phosphodiester internucleoside linkage.

[0317] In some embodiments, in any one of the DUX-targeting siRNAs described herein, one or more (e.g., 1, 2, 3, 4, 5, 6, 7 or more) of cytidines (Cs) of the sense strand and the antisense strand is a 2′-modified 5-methyl-cytidine (e.g., 2′-O-Me modified 5-methyl-cytidine or 2′-F modified 5-methyl-cytidine). In some embodiments, in any one of the DUX-targeting siRNAs described herein, one or more (e.g., 1, 2, 3, 4) of cytidines (Cs) of the sense strand and/or one or more (e.g., 1, 2, 3, 4) of cytidines (Cs) of the antisense strand is a 2′-modified 5′methyl-cytidine (e.g., 2′-O-Me modified 5-methyl-cytidine or 2′-F modified 5-methyl-cytidine).

[0318] In some embodiments, a cytidine a CG motif of the sense and/or antisense strand is a 2′-modified 5-methyl-cytidine (e.g., 2′-O-Me modified 5-methyl-cytidine or 2′-F modified 5-methyl-cytidine). In some embodiments, a cytidines of one or more (e.g., 1, 2, 3, 4) CG motifs of the sense strand is a 2′-modified 5-methyl-cytidine (e.g., 2′-O-Me modified 5-methyl-cytidine or 2′-F modified 5-methyl-cytidine). In some embodiments, a cytidine of one or more (e.g., 1, 2, 3, 4) CG motifs of the antisense strand is a 2′-modified 5-methyl-cytidine (e.g., 2′-O-Me modified 5-methyl-cytidine or 2′-F modified 5-methyl-cytidine). In some embodiments, a cytidine of one or more (e.g., 1, 2, 3, 4) CG motifs of the sense strand is a 2′-modified 5-methyl-cytidine (e.g., 2′-O-Me modified 5-methyl-cytidine or 2′-F modified 5-methyl-cytidine); and a cytidine of one or more (e.g., 1, 2, 3, 4) CG motifs of the antisense strand is a 2′-modified 5-methyl-cytidine (e.g., 2′-O-Me modified 5-methyl-cytidine or 2′-F modified 5-methyl-cytidine).

[0319] In some embodiments, the antisense strand of the DUX4-targeting oligonucleotide is selected from the modified version of SEQ ID NOs: 3027-3066 listed in Table 8. In some embodiments, the sense strand of the DUX4-targeting oligonucleotide is selected from the modified version of SEQ ID NOs: 2987-3026 listed in Table 8. In some embodiments, the DUX4-targeting oligonucleotide is a siRNA selected from the siRNAs listed in Table 8.

[0320] In some embodiments, the antisense strand of the DUX4-targeting oligonucleotide is selected from the modified version of any one of SEQ ID NOs: 3027, 3037, 3039, 3040, 3041, 3044, 3052, and 3061 listed in Table 9. In some embodiments, the sense strand of the DUX4-targeting oligonucleotide is selected from the modified version of any one of SEQ ID NOs: 2987, 2997, 2999, 3000, 3001, 3004, 3012, and 3021 listed in Table 9. In some embodiments, the DUX4-targeting oligonucleotide is a siRNA selected from the siRNAs listed in Table 9.

[0321] In some embodiments, any one of the DUX4-targeting oligonucleotides (e.g., DUX4-targeting siRNAs selected from the siRNAs in Table 8) can be in salt form, e.g., as sodium, potassium, magnesium salts. In some embodiments, any one of the DUX4-targeting oligonucleotides (e.g., DUX4-targeting siRNAs selected from the siRNAs in Table 9) can be in salt form, e.g., as sodium, potassium, magnesium salts.

[0322] In some embodiments, the 5′ or 3′ nucleoside (e.g., terminal nucleoside) of any one of the oligonucleotides described herein (e.g., the oligonucleotides listed in Table 8) is conjugated to an amine group, optionally via a spacer. In some embodiments, the 5′ or 3′ nucleoside (e.g., terminal nucleoside) of any one of the oligonucleotides described herein (e.g., the oligonucleotides listed in Table 9) is conjugated to an amine group, optionally via a spacer. In some embodiments, the spacer comprises an aliphatic moiety. In some embodiments, the spacer comprises a polyethylene glycol moiety. In some embodiments, a phosphodiester linkage is present between the spacer and the 5′ or 3′ nucleoside of the oligonucleotide. In some embodiments, the 5′ or 3′ nucleoside (e.g., terminal nucleoside) of any of the oligonucleotides described herein (e.g., the oligonucleotides listed in Table 8) is conjugated to a spacer that is a substituted or unsubstituted aliphatic, substituted or unsubstituted heteroaliphatic, substituted or unsubstituted carbocyclylene, substituted or unsubstituted heterocyclylene, substituted or unsubstituted arylene, substituted or unsubstituted heteroarylene, —O—, —N(R^{A})—, —S—, —C(═O)—, —C(═O)O—, —C(═O)NR^{A}—, —NR^{A}C(═O), —NR^{A}C(═O)R^{A}—, —C(═O)R^{A}—, —NR^{A}C(═O)O—, —NR^{A}C(═O)N(R^{A})—, —OC(O), —OC(═O)—, —OC(═O)N(R^{A})—, —S(O)₂NR^{A}—, —NR^{A}S(O)₂—, or a combination thereof, each R^{A} is independently hydrogen or substituted or unsubstituted alkyl. In some embodiments, the 5′ or 3′ nucleoside (e.g., terminal nucleoside) of any of the oligonucleotides described herein (e.g., the oligonucleotides listed in Table 9) is conjugated to a spacer that is a substituted or unsubstituted aliphatic, substituted or unsubstituted heteroaliphatic, substituted or unsubstituted carbocyclylene, substituted or unsubstituted heterocyclylene, substituted or unsubstituted arylene, substituted or unsubstituted heteroarylene, —O—, —N(R^{A})—, —S—, —C(═O)—, —C(═O)—, —C(═O)NR^{A}—, —NR^{A}C(═O)—, —NR^{A}C(═O)R^{A}—, —C(═O)R^{A}—, —NR^{A}C(═O)O—, —NR^{A}C(═O)N(R^{A})—, —OC(═O)—, —OC(═O)O—, —OC(═O)N(R^{A})—, —S(O)₂NR^{A}—, —NR^{A}S(O)₂—, or a combination thereof; each R^{A} is independently hydrogen or substituted or unsubstituted alkyl. In certain embodiments, the spacer is a substituted or unsubstituted alkylene, substituted or unsubstituted heterocyclylene, substituted or unsubstituted heteroarylene, —O—, —N(R^{A})—, or —C(═O)N(R^{A})₂, or a combination thereof.

[0323] In some embodiments, the 5′ or 3′ nucleoside of any one of the oligonucleotides described herein (e.g., the oligonucleotides listed in Table 8, sense or antisense strand) is conjugated to a compound of the formula —NH₂—(CH₂)ₙ—, wherein n is an integer from 1 to 12. In some embodiments, the 5′ or 3′ nucleoside of any one of the oligonucleotides described herein (e.g., the oligonucleotides listed in Table 9, sense or antisense strand) is conjugated to a compound of the formula —NH₂—(CH₂)ₙ—, wherein n is an integer from 1 to 12. In some embodiments, n is 6, 7, 8, 9, 10, 11, or 12. In some embodiments, a phosphodiester linkage is present between the compound of the formula NH₂—(CH₂)ₙ— and the 5′ or 3′ nucleoside of the oligonucleotide (e.g., the oligonucleotides listed in Table 8, sense or antisense strand). In some embodiments, a phosphodiester linkage is present between the compound of the formula NH₂—(CH₂)ₙ— and the 5′ or 3′ nucleoside of the oligonucleotide (e.g., the oligonucleotides listed in Table 9, sense or antisense strand). In some embodiments, a compound of the formula NH₂—(CH₂)₆— is conjugated to the oligonucleotide via a reaction between 6-amino-1-hexanol (NH₂—(CH₂)₆—OH) and the 5′ phosphate of the oligonucleotide (e.g., 5′ phosphate of the sense or antisense strand). In some embodiments, a compound of the formula NH₂—(CH₂)₆— is conjugated to the oligonucleotide via a reaction between 6-amino-1-hexanol (NH₂—(CH₂)₆—OH) and the 3′ phosphate of the oligonucleotide (e.g., 3′ phosphate of the sense or antisense strand). In some embodiments, the oligonucleotide is conjugated to a targeting agent, e.g., a muscle targeting agent such as an anti-TfR antibody, e.g., via the amine group.

[0324] C. Linkers

[0325] Complexes described herein generally comprise a linker that connects any one of the anti-TfR antibodies described herein to a molecular payload. A linker comprises at least one covalent bond. In some embodiments, a linker may be a single bond, e.g., a disulfide bond or disulfide bridge, that connects an anti-TfR antibody to a molecular payload. However, in some embodiments, a linker may connect any one of the anti-TfR antibodies described herein to a molecular payload through multiple covalent bonds. In some embodiments, a linker may be a cleavable linker. However, in some embodiments, a linker may be a non-cleavable linker. A linker is generally stable in vitro and in vivo, and may be stable in certain cellular environments. Additionally, generally a linker does not negatively impact the functional properties of either the anti-TfR antibody or the molecular payload. Examples and methods of synthesis of linkers are known in the art (see, e.g. Kline, T. et al. “Methods to Make Homogenous Antibody Drug Conjugates.” Pharmaceutical Research, 2015, 32:11, 3480-3493.; Jain, N. et al. “Current ADC Linker Chemistry” Pharm Res. 2015, 32:11, 3526-3540.; McCombs, J. R. and Owen, S. C. “Antibody Drug Conjugates: Design and Selection of Linker, Payload and Conjugation Chemistry” AAPS J. 2015, 17:2, 339-351.).

[0326] A precursor to a linker typically will contain two different reactive species that allow for attachment to both the anti-TfR antibody and a molecular payload. In some embodiments, the two different reactive species may be a nucleophile and/or (e.g., and) an electrophile. In some embodiments, a linker is connected to an anti-TfR antibody via conjugation to a lysine residue or a cysteine residue of the anti-TfR antibody. In some embodiments, a linker is connected to a cysteine residue of an anti-TfR antibody via a maleimide-containing linker, wherein optionally the maleimide-containing linker comprises a maleimidocaproyl or maleimidomethyl cyclohexane-1-carboxylate group. In some embodiments, a linker is connected to a cysteine residue of an anti-TfR antibody or thiol functionalized molecular payload via a 3-arylpropionitrile functional group. In some embodiments, a linker is connected to a lysine residue of an anti-TfR antibody. In some embodiments, a linker is connected to an anti-TfR antibody and/or (e.g., and) a molecular payload via an amide bond, a carbamate bond, a hydrazide, a triazole, a thioether, or a disulfide bond.

[0327] i. Cleavable Linkers

[0328] A cleavable linker may be a protease-sensitive linker, a pH-sensitive linker, or a glutathione-sensitive linker. These linkers are generally cleavable only intracellularly and are preferably stable in extracellular environments, e.g. extracellular to a muscle cell.

[0329] Protease-sensitive linkers are cleavable by protease enzymatic activity. These linkers typically comprise peptide sequences and may be 2-10 amino acids, about 2-5 amino acids, about 5-10 amino acids, about 10 amino acids, about 5 amino acids, about 3 amino acids, or about 2 amino acids in length. In some embodiments, a peptide sequence may comprise naturally-occurring amino acids, e.g. cysteine, alanine, or non-naturally-occurring or modified amino acids. Non-naturally occurring amino acids include 3-amino acids, homo-amino acids, proline derivatives, 3-substituted alanine derivatives, linear core amino acids, N-methyl amino acids, and others known in the art. In some embodiments, a protease-sensitive linker comprises a valine-citrulline or alanine-citrulline sequence. In some embodiments, a protease-sensitive linker can be cleaved by a lysosomal protease, e.g. cathepsin B, and/or (e.g., and) an endosomal protease.

[0330] A pH-sensitive linker is a covalent linkage that readily degrades in high or low pH environments. In some embodiments, a pH-sensitive linker may be cleaved at a pH in a range of 4 to 6. In some embodiments, a pH-sensitive linker comprises a hydrazone or cyclic acetal. In some embodiments, a pH-sensitive linker is cleaved within an endosome or a lysosome.

[0331] In some embodiments, a glutathione-sensitive linker comprises a disulfide moiety. In some embodiments, a glutathione-sensitive linker is cleaved by a disulfide exchange reaction with a glutathione species inside a cell. In some embodiments, the disulfide moiety further comprises at least one amino acid, e.g. a cysteine residue.

[0332] In some embodiments, the linker is a Val-cit linker (e.g., as described in U.S. Pat. No. 6,214,345, incorporated herein by reference). In some embodiments, before conjugation, the val-cit linker has a structure of:

[chemical structure]

[0333] In some embodiments, after conjugation, the val-cit linker has a structure of:

[chemical structure]

[0334] In some embodiments, the Val-cit linker is attached to a reactive chemical moiety (e.g., SPAAC for click chemistry conjugation). In some embodiments, before click chemistry conjugation, the val-cit linker attached to a reactive chemical moiety (e.g., SPAAC for click chemistry conjugation) has the structure of:

[chemical structure]

wherein n is any number from 0-10. In some embodiments, n is 3.

[0335] In some embodiments, the val-cit linker attached to a reactive chemical moiety (e.g., SPAAC for click chemistry conjugation) is conjugated (e.g., via a different chemical moiety) to a molecular payload (e.g., an oligonucleotide). In some embodiments, the val-cit linker attached to a reactive chemical moiety (e.g., SPAAC for click chemistry conjugation) and conjugated to a molecular payload (e.g., an oligonucleotide) has the structure of formula (A) (before click chemistry conjugation):

[chemical structure]

wherein n is any number from 0-10. In some embodiments, n is 3.

[0336] In some embodiments, after conjugation to a molecular payload (e.g., an oligonucleotide), the val-cit linker comprises a structure of formula (B):

[chemical structure]

wherein n is any number from 0-10, and wherein m is any number from 0-10. In some embodiments, n is 3 and m is 4.

[0337] ii. Non-Cleavable Linkers

[0338] In some embodiments, non-cleavable linkers may be used. Generally, a non-cleavable linker cannot be readily degraded in a cellular or physiological environment. In some embodiments, a non-cleavable linker comprises an optionally substituted alkyl group, wherein the substitutions may include halogens, hydroxyl groups, oxygen species, and other common substitutions. In some embodiments, a linker may comprise an optionally substituted alkyl, an optionally substituted alkylene, an optionally substituted arylene, a heteroarylene, a peptide sequence comprising at least one non-natural amino acid, a truncated glycan, a sugar or sugars that cannot be enzymatically degraded, an azide, an alkyne-azide, a peptide sequence comprising a LPXT sequence, a thioether, a biotin, a biphenyl, repeating units of polyethylene glycol or equivalent compounds, acid esters, acid amides, sulfamides, and/or (e.g., and) an alkoxy-amine linker. In some embodiments, sortase-mediated ligation will be utilized to covalently link an anti-TfR antibody comprising a LPXT sequence to a molecular payload comprising a (G)ₙ sequence (see, e.g. Proft T. Sortase-mediated protein ligation: an emerging biotechnology tool for protein modification and immobilization. Biotechnol Lett. 2010, 32(1):1-10.).

[0339] In some embodiments, a linker may comprise a substituted alkylene, an optionally substituted alkenylene, an optionally substituted alkynylene, an optionally substituted cycloalkylene, an optionally substituted cycloalkenylene, an optionally substituted arylene, an optionally substituted heteroarylene further comprising at least one heteroatom selected from N, O, and S; an optionally substituted heterocyclylene further comprising at least one heteroatom selected from N, O, and S; an imino, an optionally substituted nitrogen species, an optionally substituted oxygen species O, an optionally substituted sulfur species, or a poly(alkylene oxide), e.g. polyethylene oxide or polypropylene oxide.

[0340] In some embodiments, a linker may comprise a Bis-PFP monodidispersed PEG having the structure of:

[chemical structure]

wherein n is 1-10.

[0341] iii. Linker Conjugation

[0342] In some embodiments, a linker is connected to an anti-TfR antibody and/or (e.g., and) molecular payload via a phosphate, thioether, ether, carbon-carbon, carbamate, or amide bond. In some embodiments, a linker is connected to an oligonucleotide through a phosphate or phosphorothioate group, e.g. a terminal phosphate of an oligonucleotide backbone. In some embodiments, a linker is connected to an anti-TfR antibody, through a lysine or cysteine residue present on the anti-TfR antibody.

[0343] In some embodiments, a linker is connected to an anti-TfR antibody and/or (e.g., and) molecular payload by a cycloaddition reaction between an azide and an alkyne to form a triazole, wherein the azide and the alkyne may be located on the anti-TfR antibody, molecular payload, or the linker. In some embodiments, an alkyne may be a cyclic alkyne, e.g., a cyclooctyne. In some embodiments, an alkyne may be bicyclononyne (also known as bicyclo[6.1.0]nonyne or BCN) or substituted bicyclononyne. In some embodiments, a cyclooctane is as described in International Patent Application Publication WO2011136645, published on Nov. 3, 2011, entitled, “Fused Cyclooctyne Compounds And Their Use In Metal-free Click Reactions”. In some embodiments, an azide may be a sugar or carbohydrate molecule that comprises an azide. In some embodiments, an azide may be 6-azido-6-deoxygalactose or 6-azido-N-acetylgalactosamine. In some embodiments, a sugar or carbohydrate molecule that comprises an azide is as described in International Patent Application Publication WO2016170186, published on Oct. 27, 2016, entitled, “Process For The Modification Of A Glycoprotein Using A Glycosyltransferase That Is Or Is Derived From A β(1,4)-N-Acetylgalactosaminyltransferase”. In some embodiments, a cycloaddition reaction between an azide and an alkyne to form a triazole, wherein the azide and the alkyne may be located on the anti-TfR antibody, molecular payload, or the linker is as described in International Patent Application Publication WO2014065661, published on May 1, 2014, entitled, “Modified antibody, antibody-conjugate and process for the preparation thereof”; or International Patent Application Publication WO2016170186, published on Oct. 27, 2016, entitled, “Process For The Modification Of A Glycoprotein Using A Glycosyltransferase That Is Or Is Derived From A β(1,4)-N-Acetylgalactosaminyltransferase”.

[0344] In some embodiments, a linker further comprises a spacer, e.g., a polyethylene glycol spacer or an acyl/carbomoyl sulfamide spacer, e.g., a HydraSpace™ spacer. In some embodiments, a spacer is as described in Verkade, J. M. M. et al., “A Polar Sulfamide Spacer Significantly Enhances the Manufacturability, Stability, and Therapeutic Index of Antibody-Drug Conjugates”, Antibodies, 2018, 7, 12.

[0345] In some embodiments, a linker is connected to an anti-TfR antibody and/or (e.g., and) molecular payload by the Diels-Alder reaction between a dienophile and a diene/hetero-diene, wherein the dienophile and the diene/hetero-diene may be located on the anti-TfR antibody, molecular payload, or the linker. In some embodiments a linker is connected to an anti-TfR antibody and/or (e.g., and) molecular payload by other pericyclic reactions, e.g. ene reaction. In some embodiments, a linker is connected to an anti-TfR antibody and/or (e.g., and) molecular payload by an amide, thioamide, or sulfonamide bond reaction. In some embodiments, a linker is connected to an anti-TfR antibody and/or (e.g., and) molecular payload by a condensation reaction to form an oxime, hydrazone, or semicarbazide group existing between the linker and the anti-TfR antibody and/or (e.g., and) molecular payload.

[0346] In some embodiments, a linker is connected to an anti-TfR antibody and/or (e.g., and) molecular payload by a conjugate addition reactions between a nucleophile, e.g. an amine or a hydroxyl group, and an electrophile, e.g. a carboxylic acid, carbonate, or an aldehyde. In some embodiments, a nucleophile may exist on a linker and an electrophile may exist on an anti-TfR antibody or molecular payload prior to a reaction between a linker and an anti-TfR antibody or molecular payload. In some embodiments, an electrophile may exist on a linker and a nucleophile may exist on an anti-TfR antibody or molecular payload prior to a reaction between a linker and an anti-TfR antibody or molecular payload. In some embodiments, an electrophile may be an azide, pentafluorophenyl, a silicon centers, a carbonyl, a carboxylic acid, an anhydride, an isocyanate, a thioisocyanate, a succinimidyl ester, a sulfosuccinimidyl ester, a maleimide, an alkyl halide, an alkyl pseudohalide, an epoxide, an episulfide, an aziridine, an aryl, an activated phosphorus center, and/or (e.g., and) an activated sulfur center. In some embodiments, a nucleophile may be an optionally substituted alkene, an optionally substituted alkyne, an optionally substituted aryl, an optionally substituted heterocyclyl, a hydroxyl group, an amino group, an alkylamino group, an anilido group, or a thiol group.

[0347] In some embodiments, the val-cit linker attached to a reactive chemical moiety (e.g., SPAAC for click chemistry conjugation) is conjugated to the anti-TfR antibody by a structure of:

[chemical structure]

wherein m is any number from 0-10. In some embodiments, m is 4.

[0348] In some embodiments, the val-cit linker attached to a reactive chemical moiety (e.g., SPAAC for click chemistry conjugation) is conjugated to an anti-TfR antibody having a structure of formula (G):

[chemical structure]

wherein m is any number from 0-10. In some embodiments, m is 4. It should be understood that the amide shown adjacent the anti-TfR1 antibody in Formula (G) results from a reaction with an amine of the anti-TfR1 antibody, such as a lysine epsilon amine.

[0349] In some embodiments, the val-cit linker attached to a reactive chemical moiety (e.g., SPAAC for click chemistry conjugation) and conjugated to an anti-TfR antibody has a structure of formula (F):

[chemical structure]

wherein n is any number from 0-10, wherein m is any number from 0-10. In some embodiments, n is 3 and/or (e.g., and) m is 4. In some embodiments, an oligonucleotide is covalently linked to a compound comprising a structure of formula (F), thereby forming a complex comprising a structure of formula (D). It should be understood that the amide shown adjacent the anti-TfR1 antibody in Formula (F) results from a reaction with an amine of the anti-TfR1 antibody, such as a lysine epsilon amine.

[0350] In some embodiments, the val-cit linker that links the antibody and the molecular payload has a structure of formula (C).

[chemical structure]

wherein n is any number from 0-10, wherein m is any number from 0-10. In some embodiments, n is 3 and/or (e.g., and) m is 4. In some embodiments, n is 3 and/or (e.g., and) m is 4. In some embodiments, X is NH (e.g., NH from an amine group of a lysine), S (e.g., S from a thiol group of a cysteine), or O (e.g., O from a hydroxyl group of a serine, threonine, or tyrosine) of the antibody.

[0351] In some embodiments, the complex described herein has a structure of formula (D):

[chemical structure]

wherein n is any number from 0-10, wherein m is any number from 0-10. In some embodiments, n is 3 and/or (e.g., and) m is 4.

[0352] In structures formula (A), (B), (C), and (D), L1 is, in some embodiments, a spacer that is a substituted or unsubstituted aliphatic, substituted or unsubstituted heteroaliphatic, substituted or unsubstituted carbocyclylene, substituted or unsubstituted heterocyclylene, substituted or unsubstituted arylene, substituted or unsubstituted heteroarylene, —O—, —N(R^{A})—, —S—, —C(═O)—, —C(═O)O—, —C(═O)NR^{A}—, —NR^{A}C(═O)—, —NR^{A}C(═O)R^{A}—, —C(═O)R^{A}—, —NR^{A}C(═O)O—, —NR^{A}C(═O)N(R^{A})—, —OC(O), —OC(═O)—, —OC(═O)N(R^{A})—, —S(O)₂NR^{A}—, —NR^{A}S(O)₂—, or a combination thereof, wherein each R^{A} is independently hydrogen or substituted or unsubstituted alkyl. In some embodiments, L1 is

[chemical structure]

wherein L2 is

[chemical structure]

wherein a labels the site directly linked to the carbamate moiety of formula (A), (B), (C), and (D); and b labels the site covalently linked (directly or via additional chemical moieties) to the oligonucleotide.

[0353] In some embodiments, L1 is:

[chemical structure]

wherein a labels the site directly linked to the carbamate moiety of formula (A), (B), (C), and (D); and b labels the site covalently linked (directly or via additional chemical moieties) to the oligonucleotide.

[0354] In some embodiments, L1 is

[chemical structure]

wherein x is 0-10. For example, in some embodiments, x is 3, 4, 5, or 6. In some embodiments, L1 is

[chemical structure]

In some embodiments, L1 is

[chemical structure]

[0355] In some embodiments, L1 is

[chemical structure]

[chemical structure]

[chemical structure]

[0356] In some embodiments, L1 is

[chemical structure]

wherein y is 0-10. For example, in some embodiments, y is 3, 4, 5, or 6.

[0357] In some embodiments, L1 is linked to a 5′ phosphate of the oligonucleotide. In some embodiments, the linkage of L1 to a 5′ phosphate of the oligonucleotide forms a phosphodiester bond between L1 and the oligonucleotide.

[0358] In some embodiments, L1 is linked to a 3′ phosphate of the oligonucleotide. In some embodiments, the linkage of L1 to a 3′ phosphate of the oligonucleotide forms a phosphodiester bond between L1 and the oligonucleotide.

[0359] In some embodiments, L1 is optional (e.g., need not be present).

[0360] In some embodiments, any one of the complexes described herein has a structure of formula (E).

[chemical structure]

wherein is 0-5 (e.g., 3) and m is 0-15 (e.g., 4).

[0361] C. Examples of Antibody-Molecular Payload Complexes

[0362] Further provided herein are non-limiting examples of complexes comprising any one the anti-TfR antibodies described herein covalently linked to any of the molecular payloads (e.g., an oligonucleotide) described herein. In some embodiments, the anti-TfR antibody (e.g., any one of the anti-TfR antibodies provided in Tables 2-7) is covalently linked to a molecular payload (e.g., an oligonucleotide comprising at least 12 (e.g., at least 12, at least 13, at least 14, at least 15, at least 16, at least 17, at least 18, or at least 19) consecutive nucleotides of the nucleotide sequence of any one of SEQ ID NOs: 163-3066) via a linker. In some embodiments, the anti-TfR antibody (e.g., any one of the anti-TfR antibodies provided in Tables 2-7) is covalently linked to a molecular payload (e.g., an oligonucleotide such as the oligonucleotides provided in Table 8) via a linker. In some embodiments, the anti-TfR antibody (e.g., any one of the anti-TfR antibodies provided in Tables 2-7) is covalently linked to a molecular payload (e.g., an oligonucleotide such as the oligonucleotides provided in Table 9) via a linker. Any of the linkers described herein may be used. In some embodiments, if the molecular payload is an oligonucleotide, the linker is linked to the 5′ end, the 3′ end, or internally of the sense strand or antisense strand. In some embodiments, the molecular payload is an siRNA, the linker is linked to the 5′ end of the sense strand. In some embodiments, the linker is linked to the anti-TfR antibody via a thiol-reactive linkage (e.g., via a cysteine in the anti-TfR antibody). In some embodiments, the linker (e.g., a Val-cit linker) is linked to the antibody (e.g., an anti-TfR antibody described herein) via an amine group (e.g., via a lysine in the antibody). In some embodiments, the molecular payload is a DUX4-targeting oligonucleotide (e.g., a DUX4-targeting oligonucleotide listed in Table 8). In some embodiments, the molecular payload is a DUX4-targeting oligonucleotide (e.g., a DUX4-targeting oligonucleotide listed in Table 9). In some embodiments, the molecular payload is the sense strand of a DUX4 targeting siRNA. In some embodiments, the molecular payload is the antisense strand of a DUX4 targeting siRNA. In some embodiments, the molecular payload is a DUX4 targeting siRNA comprising a sense strand and an antisense strand.

[0363] An example of a structure of a complex comprising an anti-TfR antibody covalently linked to a molecular payload via a Val-cit linker is provided below:

[chemical structure]

wherein the linker is linked to the antibody via a thiol-reactive linkage (e.g., via a cysteine in the antibody). In some embodiments, the molecular payload is an oligonucleotide comprising at least 12 (e.g., at least 12, at least 13, at least 14, at least 15, at least 16, at least 17, at least 18, or at least 19) consecutive nucleotides of the nucleotide sequence of any one of SEQ ID NOs: 163-3066. In some embodiments, the molecular payload is an oligonucleotide comprising the nucleotide sequence of any one of SEQ ID NOs: 163-3066. In some embodiments, the molecular payload is a DUX4-targeting oligonucleotide comprising an antisense strand comprising a region of complementarity of at least 16 nucleotides to a target sequence in DUX4 mRNA (e.g., a target sequence listed in Table 8), optionally wherein the antisense strand comprising at least 16 consecutive nucleotides of any one of the antisense sequences listed in Table 8, optionally wherein the DUX4 targeting oligonucleotide further comprises a sense strand that hybridizes to the antisense strand. In some embodiments, the molecular payload is a DUX4-targeting oligonucleotide comprising an antisense strand comprising a region of complementarity of at least 16 nucleotides to a target sequence in DUX4 mRNA (e.g., a target sequence listed in Table 9), optionally wherein the antisense strand comprising at least 16 consecutive nucleotides of any one of the antisense sequences listed in Table 9, optionally wherein the DUX4 targeting oligonucleotide further comprises a sense strand that hybridizes to the antisense strand.

[0364] Another example of a structure of a complex comprising an anti-TfR antibody covalently linked to a molecular payload via a Val-cit linker is provided below:

[chemical structure]

wherein n is a number between 0-10, wherein m is a number between 0-10, wherein the linker is linked to the antibody via an amine group (e.g., on a lysine residue), and/or (e.g., and) wherein the linker is linked to the sense strand or the antisense strand (e.g., at the 5′ end, 3′ end, or internally). In some embodiments, the linker is linked to the antibody via a lysine, the linker is linked to the oligonucleotide at the 5′ end, n is 3, and m is 4. In some embodiments, the molecular payload is an oligonucleotide comprising at least 12 (e.g., at least 12, at least 13, at least 14, at least 15, at least 16, at least 17, at least 18, or at least 19) nucleotides of the nucleotide sequence of any one of SEQ ID NOs: 163-3066. In some embodiments, the molecular payload is an oligonucleotide comprising the nucleotide sequence of any one of SEQ ID NOs: 163-3066. In some embodiments, the molecular payload is a DUX4-targeting oligonucleotide comprising an antisense strand comprising a region of complementarity of at least 16 nucleotides to a target sequence in DUX4 mRNA (e.g., a target sequence listed in Table 8), optionally wherein the antisense strand comprising at least 16 consecutive nucleotides of any one of the antisense sequences listed in Table 8, optionally wherein the DUX4 targeting oligonucleotide further comprises a sense strand that hybridizes to the antisense strand. In some embodiments, the molecular payload is a DUX4-targeting oligonucleotide comprising an antisense strand comprising a region of complementarity of at least 16 nucleotides to a target sequence in DUX4 mRNA (e.g., a target sequence listed in Table 9), optionally wherein the antisense strand comprising at least 16 consecutive nucleotides of any one of the antisense sequences listed in Table 9, optionally wherein the DUX4 targeting oligonucleotide further comprises a sense strand that hybridizes to the antisense strand. In some embodiments, L1 is any one of the spacers described herein.

[0365] It should be appreciated that antibodies can be linked to molecular payloads with different stochiometries, a property that may be referred to as a drug to antibody ratios (DAR) with the “drug” being the molecular payload. In some embodiments, one molecular payload is linked to an antibody (DAR=1). In some embodiments, two molecular payloads are linked to an antibody (DAR=2). In some embodiments, three molecular payloads are linked to an antibody (DAR=3). In some embodiments, four molecular payloads are linked to an antibody (DAR=4). In some embodiments, a mixture of different complexes, each having a different DAR, is provided. In some embodiments, an average DAR of complexes in such a mixture may be in a range of 1 to 3, 1 to 4, 1 to 5 or more. DAR may be increased by conjugating molecular payloads to different sites on an antibody and/or (e.g., and) by conjugating multimers to one or more sites on antibody. For example, a DAR of 2 may be achieved by conjugating a single molecular payload to two different sites on an antibody or by conjugating a dimer molecular payload to a single site of an antibody.

[0366] In some embodiments, the complex described herein comprises an anti-TfR antibody described herein (e.g., the antibodies provided in Tables 2-7) covalently linked to a molecular payload. In some embodiments, the complex described herein comprises an anti-TfR antibody described herein (e.g., the antibodies provided in Tables 2-7) covalently linked to molecular payload via a linker (e.g., a Val-cit linker). In some embodiments, the linker (e.g., a Val-cit linker) is linked to the antibody (e.g., an anti-TfR antibody described herein) via a thiol-reactive linkage (e.g., via a cysteine in the antibody). In some embodiments, the linker (e.g., a Val-cit linker) is linked to the antibody (e.g., an anti-TfR antibody described herein) via an amine group (e.g., via a lysine in the antibody). In some embodiments, the molecular payload is an oligonucleotide comprising at least 12 (e.g., at least 12, at least 13, at least 14, at least 15, at least 16, at least 17, at least 18, or at least 19) nucleotides of the nucleotide sequence of any one of SEQ ID NOs: 163-3066. In some embodiments, the molecular payload is an oligonucleotide comprising the nucleotide sequence of any one of SEQ ID NOs: 163-3066. In some embodiments, the molecular payload is a DUX4-targeting oligonucleotide comprising an antisense strand comprising a region of complementarity of at least 16 nucleotides to a target sequence in DUX4 mRNA (e.g., a target sequence as set forth in any one of SEQ ID NOs: 163-1574), optionally wherein the antisense strand comprising at least 16 consecutive nucleotides of any one of the antisense sequences as set forth in any one of SEQ ID NOs: 1575-1986, optionally wherein the DUX4 targeting oligonucleotide further comprises a sense strand that hybridizes to the antisense strand. In some embodiments, the molecular payload is a DUX4-targeting oligonucleotide comprising an antisense strand comprising a region of complementarity of at least 16 nucleotides to a target sequence in DUX4 mRNA (e.g., a target sequence listed in Table 8), optionally wherein the antisense strand comprising at least 16 consecutive nucleotides of any one of the antisense sequences listed in Table 8, optionally wherein the DUX4 targeting oligonucleotide further comprises a sense strand that hybridizes to the antisense strand. In some embodiments, the molecular payload is a DUX4-targeting oligonucleotide comprising an antisense strand comprising a region of complementarity of at least 16 nucleotides to a target sequence in DUX4 mRNA (e.g., a target sequence listed in Table 9), optionally wherein the antisense strand comprising at least 16 consecutive nucleotides of any one of the antisense sequences listed in Table 9, optionally wherein the DUX4 targeting oligonucleotide further comprises a sense strand that hybridizes to the antisense strand.

[0367] In some embodiments, the complex described herein comprises an anti-TfR antibody covalently linked to a molecular payload, wherein the anti-TfR antibody comprises a CDR-H1, a CDR-H2, a CDR-H3, a CDR-L1, a CDR-L2, and a CDR-L3 of any one of the antibodies listed in Table 2. In some embodiments, the molecular payload is a DUX4-targeting oligonucleotide comprising an antisense strand comprising a region of complementarity of at least 16 nucleotides to a target sequence in DUX4 mRNA (e.g., a target sequence as set forth in any one of SEQ ID NOs: 163-1574), optionally wherein the antisense strand comprising at least 16 consecutive nucleotides of any one of the antisense sequences as set forth in any one of SEQ ID NOs: 1575-1986, optionally wherein the DUX4 targeting oligonucleotide further comprises a sense strand that hybridizes to the antisense strand. In some embodiments, the molecular payload is a DUX4-targeting oligonucleotide comprising an antisense strand comprising a region of complementarity of at least 16 nucleotides to a target sequence in DUX4 mRNA (e.g., a target sequence listed in Table 8), optionally wherein the antisense strand comprising at least 16 consecutive nucleotides of any one of the antisense sequences listed in Table 8, optionally wherein the DUX4 targeting oligonucleotide further comprises a sense strand that hybridizes to the antisense strand. In some embodiments, the molecular payload is a DUX4-targeting oligonucleotide comprising an antisense strand comprising a region of complementarity of at least 16 nucleotides to a target sequence in DUX4 mRNA (e.g., a target sequence listed in Table 9), optionally wherein the antisense strand comprising at least 16 consecutive nucleotides of any one of the antisense sequences listed in Table 9, optionally wherein the DUX4 targeting oligonucleotide further comprises a sense strand that hybridizes to the antisense strand.

[0368] In some embodiments, the complex described herein comprises an anti-TfR antibody covalently linked to a molecular payload, wherein the anti-TfR antibody comprises a VH comprising the amino acid sequence of SEQ ID NO: 69, SEQ ID NO: 71, or SEQ ID NO: 72, and a VL comprising the amino acid sequence of SEQ ID NO: 70. In some embodiments, the molecular payload is a DUX4-targeting oligonucleotide comprising an antisense strand comprising a region of complementarity of at least 16 nucleotides to a target sequence in DUX4 mRNA (e.g., a target sequence as set forth in any one of SEQ ID NOs: 163-1574), optionally wherein the antisense strand comprising at least 16 consecutive nucleotides of any one of the antisense sequences as set forth in any one of SEQ ID NOs: 1575-1986, optionally wherein the DUX4 targeting oligonucleotide further comprises a sense strand that hybridizes to the antisense strand. In some embodiments, the molecular payload is a DUX4-targeting oligonucleotide comprising an antisense strand comprising a region of complementarity of at least 16 nucleotides to a target sequence in DUX4 mRNA (e.g., a target sequence listed in Table 8), optionally wherein the antisense strand comprising at least 16 consecutive nucleotides of any one of the antisense sequences listed in Table 8, optionally wherein the DUX4 targeting oligonucleotide further comprises a sense strand that hybridizes to the antisense strand. In some embodiments, the molecular payload is a DUX4-targeting oligonucleotide comprising an antisense strand comprising a region of complementarity of at least 16 nucleotides to a target sequence in DUX4 mRNA (e.g., a target sequence listed in Table 9), optionally wherein the antisense strand comprising at least 16 consecutive nucleotides of any one of the antisense sequences listed in Table 9, optionally wherein the DUX4 targeting oligonucleotide further comprises a sense strand that hybridizes to the antisense strand.

[0369] In some embodiments, the complex described herein comprises an anti-TfR antibody covalently linked to a molecular payload, wherein the anti-TfR antibody comprises a VH comprising the amino acid sequence of SEQ ID NO: 73 or SEQ ID NO: 76, and a VL comprising the amino acid sequence of SEQ ID NO: 74. In some embodiments, the molecular payload is a DUX4-targeting oligonucleotide comprising an antisense strand comprising a region of complementarity of at least 16 nucleotides to a target sequence in DUX4 mRNA (e.g., a target sequence as set forth in any one of SEQ ID NOs: 163-1574), optionally wherein the antisense strand comprising at least 16 consecutive nucleotides of any one of the antisense sequences as set forth in any one of SEQ ID NOs: 1575-1986, optionally wherein the DUX4 targeting oligonucleotide further comprises a sense strand that hybridizes to the antisense strand. In some embodiments, the molecular payload is a DUX4-targeting oligonucleotide comprising an antisense strand comprising a region of complementarity of at least 16 nucleotides to a target sequence in DUX4 mRNA (e.g., a target sequence listed in Table 8), optionally wherein the antisense strand comprising at least 16 consecutive nucleotides of any one of the antisense sequences listed in Table 8, optionally wherein the DUX4 targeting oligonucleotide further comprises a sense strand that hybridizes to the antisense strand. In some embodiments, the molecular payload is a DUX4-targeting oligonucleotide comprising an antisense strand comprising a region of complementarity of at least 16 nucleotides to a target sequence in DUX4 mRNA (e.g., a target sequence listed in Table 9), optionally wherein the antisense strand comprising at least 16 consecutive nucleotides of any one of the antisense sequences listed in Table 9, optionally wherein the DUX4 targeting oligonucleotide further comprises a sense strand that hybridizes to the antisense strand.

[0370] In some embodiments, the complex described herein comprises an anti-TfR antibody covalently linked to a molecular payload, wherein the anti-TfR antibody comprises a VH comprising the amino acid sequence of SEQ ID NO: 73 or SEQ ID NO: 76, and a VL comprising the amino acid sequence of SEQ ID NO: 75. In some embodiments, the molecular payload is a DUX4-targeting oligonucleotide comprising an antisense strand comprising a region of complementarity of at least 16 nucleotides to a target sequence in DUX4 mRNA (e.g., a target sequence as set forth in any one of SEQ ID NOs: 163-1574), optionally wherein the antisense strand comprising at least 16 consecutive nucleotides of any one of the antisense sequences as set forth in any one of SEQ ID NOs: 1575-1986, optionally wherein the DUX4 targeting oligonucleotide further comprises a sense strand that hybridizes to the antisense strand. In some embodiments, the molecular payload is a DUX4-targeting oligonucleotide comprising an antisense strand comprising a region of complementarity of at least 16 nucleotides to a target sequence in DUX4 mRNA (e.g., a target sequence listed in Table 8), optionally wherein the antisense strand comprising at least 16 consecutive nucleotides of any one of the antisense sequences listed in Table 8, optionally wherein the DUX4 targeting oligonucleotide further comprises a sense strand that hybridizes to the antisense strand. In some embodiments, the molecular payload is a DUX4-targeting oligonucleotide comprising an antisense strand comprising a region of complementarity of at least 16 nucleotides to a target sequence in DUX4 mRNA (e.g., a target sequence listed in Table 9), optionally wherein the antisense strand comprising at least 16 consecutive nucleotides of any one of the antisense sequences listed in Table 9, optionally wherein the DUX4 targeting oligonucleotide further comprises a sense strand that hybridizes to the antisense strand.

[0371] In some embodiments, the complex described herein comprises an anti-TfR antibody covalently linked to a molecular payload, wherein the anti-TfR antibody comprises a VH comprising the amino acid sequence of SEQ ID NO: 77, and a VL comprising the amino acid sequence of SEQ ID NO: 78. In some embodiments, the molecular payload is a DUX4-targeting oligonucleotide comprising an antisense strand comprising a region of complementarity of at least 16 nucleotides to a target sequence in DUX4 mRNA (e.g., a target sequence as set forth in any one of SEQ ID NOs: 163-1574), optionally wherein the antisense strand comprising at least 16 consecutive nucleotides of any one of the antisense sequences as set forth in any one of SEQ ID NOs: 1575-1986, optionally wherein the DUX4 targeting oligonucleotide further comprises a sense strand that hybridizes to the antisense strand. In some embodiments, the molecular payload is a DUX4-targeting oligonucleotide comprising an antisense strand comprising a region of complementarity of at least 16 nucleotides to a target sequence in DUX4 mRNA (e.g., a target sequence listed in Table 8), optionally wherein the antisense strand comprising at least 16 consecutive nucleotides of any one of the antisense sequences listed in Table 8, optionally wherein the DUX4 targeting oligonucleotide further comprises a sense strand that hybridizes to the antisense strand. In some embodiments, the molecular payload is a DUX4-targeting oligonucleotide comprising an antisense strand comprising a region of complementarity of at least 16 nucleotides to a target sequence in DUX4 mRNA (e.g., a target sequence listed in Table 9), optionally wherein the antisense strand comprising at least 16 consecutive nucleotides of any one of the antisense sequences listed in Table 9, optionally wherein the DUX4 targeting oligonucleotide further comprises a sense strand that hybridizes to the antisense strand.

[0372] In some embodiments, the complex described herein comprises an anti-TfR antibody covalently linked to a molecular payload, wherein the anti-TfR antibody comprises a VH comprising the amino acid sequence of SEQ ID NO: 77 or SEQ ID NO: 79, and a VL comprising the amino acid sequence of SEQ ID NO: 80. In some embodiments, the molecular payload is a DUX4-targeting oligonucleotide comprising an antisense strand comprising a region of complementarity of at least 16 nucleotides to a target sequence in DUX4 mRNA (e.g., a target sequence as set forth in any one of SEQ ID NOs: 163-1574), optionally wherein the antisense strand comprising at least 16 consecutive nucleotides of any one of the antisense sequences as set forth in any one of SEQ ID NOs: 1575-1986, optionally wherein the DUX4 targeting oligonucleotide further comprises a sense strand that hybridizes to the antisense strand. In some embodiments, the molecular payload is a DUX4-targeting oligonucleotide comprising an antisense strand comprising a region of complementarity of at least 16 nucleotides to a target sequence in DUX4 mRNA (e.g., a target sequence listed in Table 8), optionally wherein the antisense strand comprising at least 16 consecutive nucleotides of any one of the antisense sequences listed in Table 8, optionally wherein the DUX4 targeting oligonucleotide further comprises a sense strand that hybridizes to the antisense strand. In some embodiments, the molecular payload is a DUX4-targeting oligonucleotide comprising an antisense strand comprising a region of complementarity of at least 16 nucleotides to a target sequence in DUX4 mRNA (e.g., a target sequence listed in Table 9), optionally wherein the antisense strand comprising at least 16 consecutive nucleotides of any one of the antisense sequences listed in Table 9, optionally wherein the DUX4 targeting oligonucleotide further comprises a sense strand that hybridizes to the antisense strand.

[0373] In some embodiments, the complex described herein comprises an anti-TfR antibody covalently linked to a molecular payload, wherein the anti-TfR antibody comprises a VH comprising the amino acid sequence of SEQ ID NO: 154, and a VL comprising the amino acid sequence of SEQ ID NO: 155. In some embodiments, the molecular payload is a DUX4-targeting oligonucleotide comprising an antisense strand comprising a region of complementarity of at least 16 nucleotides to a target sequence in DUX4 mRNA (e.g., a target sequence as set forth in any one of SEQ ID NOs: 163-1574), optionally wherein the antisense strand comprising at least 16 consecutive nucleotides of any one of the antisense sequences as set forth in any one of SEQ ID NOs: 1575-1986, optionally wherein the DUX4 targeting oligonucleotide further comprises a sense strand that hybridizes to the antisense strand. In some embodiments, the molecular payload is a DUX4-targeting oligonucleotide comprising an antisense strand comprising a region of complementarity of at least 16 nucleotides to a target sequence in DUX4 mRNA (e.g., a target sequence listed in Table 8), optionally wherein the antisense strand comprising at least 16 consecutive nucleotides of any one of the antisense sequences listed in Table 8, optionally wherein the DUX4 targeting oligonucleotide further comprises a sense strand that hybridizes to the antisense strand. In some embodiments, the molecular payload is a DUX4-targeting oligonucleotide comprising an antisense strand comprising a region of complementarity of at least 16 nucleotides to a target sequence in DUX4 mRNA (e.g., a target sequence listed in Table 9), optionally wherein the antisense strand comprising at least 16 consecutive nucleotides of any one of the antisense sequences listed in Table 9, optionally wherein the DUX4 targeting oligonucleotide further comprises a sense strand that hybridizes to the antisense strand.

[0374] In some embodiments, the molecular payload is a DUX4-targeting oligonucleotide (e.g., a DUX4-targeting oligonucleotide listed in Table 8). In some embodiments, the molecular payload is a DUX4-targeting oligonucleotide (e.g., a DUX4-targeting oligonucleotide listed in Table 9).

[0375] In some embodiments, the complex described herein comprises an anti-TfR antibody covalently linked to a molecular payload, wherein the anti-TfR antibody comprises a heavy chain comprising the amino acid sequence of SEQ ID NO: 84, SEQ ID NO: 86 or SEQ ID NO: 87 and a light chain comprising the amino acid sequence of SEQ ID NO: 85. In some embodiments, the molecular payload is a DUX4-targeting oligonucleotide comprising an antisense strand comprising a region of complementarity of at least 16 nucleotides to a target sequence in DUX4 mRNA (e.g., a target sequence as set forth in any one of SEQ ID NOs: 163-1574), optionally wherein the antisense strand comprising at least 16 consecutive nucleotides of any one of the antisense sequences as set forth in any one of SEQ ID NOs: 1575-1986, optionally wherein the DUX4 targeting oligonucleotide further comprises a sense strand that hybridizes to the antisense strand. In some embodiments, the molecular payload is a DUX4-targeting oligonucleotide comprising an antisense strand comprising a region of complementarity of at least 16 nucleotides to a target sequence in DUX4 mRNA (e.g., a target sequence listed in Table 8), optionally wherein the antisense strand comprising at least 16 consecutive nucleotides of any one of the antisense sequences listed in Table 8, optionally wherein the DUX4 targeting oligonucleotide further comprises a sense strand that hybridizes to the antisense strand. In some embodiments, the molecular payload is a DUX4-targeting oligonucleotide comprising an antisense strand comprising a region of complementarity of at least 16 nucleotides to a target sequence in DUX4 mRNA (e.g., a target sequence listed in Table 9), optionally wherein the antisense strand comprising at least 16 consecutive nucleotides of any one of the antisense sequences listed in Table 9, optionally wherein the DUX4 targeting oligonucleotide further comprises a sense strand that hybridizes to the antisense strand.

[0376] In some embodiments, the complex described herein comprises an anti-TfR antibody covalently linked to a molecular payload, wherein the anti-TfR antibody comprises a heavy chain comprising the amino acid sequence of SEQ ID NO: 88 or SEQ ID NO: 91, and a light chain comprising the amino acid sequence of SEQ ID NO: 89. In some embodiments, the molecular payload is a DUX4-targeting oligonucleotide comprising an antisense strand comprising a region of complementarity of at least 16 nucleotides to a target sequence in DUX4 mRNA (e.g., a target sequence as set forth in any one of SEQ ID NOs: 163-1574), optionally wherein the antisense strand comprising at least 16 consecutive nucleotides of any one of the antisense sequences as set forth in any one of SEQ ID NOs: 1575-1986, optionally wherein the DUX4 targeting oligonucleotide further comprises a sense strand that hybridizes to the antisense strand. In some embodiments, the molecular payload is a DUX4-targeting oligonucleotide comprising an antisense strand comprising a region of complementarity of at least 16 nucleotides to a target sequence in DUX4 mRNA (e.g., a target sequence listed in Table 8), optionally wherein the antisense strand comprising at least 16 consecutive nucleotides of any one of the antisense sequences listed in Table 8, optionally wherein the DUX4 targeting oligonucleotide further comprises a sense strand that hybridizes to the antisense strand. In some embodiments, the molecular payload is a DUX4-targeting oligonucleotide comprising an antisense strand comprising a region of complementarity of at least 16 nucleotides to a target sequence in DUX4 mRNA (e.g., a target sequence listed in Table 9), optionally wherein the antisense strand comprising at least 16 consecutive nucleotides of any one of the antisense sequences listed in Table 9, optionally wherein the DUX4 targeting oligonucleotide further comprises a sense strand that hybridizes to the antisense strand.

[0377] In some embodiments, the complex described herein comprises an anti-TfR antibody covalently linked to a molecular payload, wherein the anti-TfR antibody comprises a heavy chain comprising the amino acid sequence of SEQ ID NO: 88 or SEQ ID NO: 91, and a light chain comprising the amino acid sequence of SEQ ID NO: 90. In some embodiments, the molecular payload is a DUX4-targeting oligonucleotide comprising an antisense strand comprising a region of complementarity of at least 16 nucleotides to a target sequence in DUX4 mRNA (e.g., a target sequence as set forth in any one of SEQ ID NOs: 163-1574), optionally wherein the antisense strand comprising at least 16 consecutive nucleotides of any one of the antisense sequences as set forth in any one of SEQ ID NOs: 1575-1986, optionally wherein the DUX4 targeting oligonucleotide further comprises a sense strand that hybridizes to the antisense strand. In some embodiments, the molecular payload is a DUX4-targeting oligonucleotide comprising an antisense strand comprising a region of complementarity of at least 16 nucleotides to a target sequence in DUX4 mRNA (e.g., a target sequence listed in Table 8), optionally wherein the antisense strand comprising at least 16 consecutive nucleotides of any one of the antisense sequences listed in Table 8, optionally wherein the DUX4 targeting oligonucleotide further comprises a sense strand that hybridizes to the antisense strand. In some embodiments, the molecular payload is a DUX4-targeting oligonucleotide comprising an antisense strand comprising a region of complementarity of at least 16 nucleotides to a target sequence in DUX4 mRNA (e.g., a target sequence listed in Table 9), optionally wherein the antisense strand comprising at least 16 consecutive nucleotides of any one of the antisense sequences listed in Table 9, optionally wherein the DUX4 targeting oligonucleotide further comprises a sense strand that hybridizes to the antisense strand.

[0378] In some embodiments, the complex described herein comprises an anti-TfR antibody covalently linked to a molecular payload, wherein the anti-TfR antibody comprises a heavy chain comprising the amino acid sequence of SEQ ID NO: 92 or SEQ ID NO: 94, and a light chain comprising the amino acid sequence of SEQ ID NO: 95. In some embodiments, the molecular payload is a DUX4-targeting oligonucleotide comprising an antisense strand comprising a region of complementarity of at least 16 nucleotides to a target sequence in DUX4 mRNA (e.g., a target sequence as set forth in any one of SEQ ID NOs: 163-1574), optionally wherein the antisense strand comprising at least 16 consecutive nucleotides of any one of the antisense sequences as set forth in any one of SEQ ID NOs: 1575-1986, optionally wherein the DUX4 targeting oligonucleotide further comprises a sense strand that hybridizes to the antisense strand. In some embodiments, the molecular payload is a DUX4-targeting oligonucleotide comprising an antisense strand comprising a region of complementarity of at least 16 nucleotides to a target sequence in DUX4 mRNA (e.g., a target sequence listed in Table 8), optionally wherein the antisense strand comprising at least 16 consecutive nucleotides of any one of the antisense sequences listed in Table 8, optionally wherein the DUX4 targeting oligonucleotide further comprises a sense strand that hybridizes to the antisense strand. In some embodiments, the molecular payload is a DUX4-targeting oligonucleotide comprising an antisense strand comprising a region of complementarity of at least 16 nucleotides to a target sequence in DUX4 mRNA (e.g., a target sequence listed in Table 9), optionally wherein the antisense strand comprising at least 16 consecutive nucleotides of any one of the antisense sequences listed in Table 9, optionally wherein the DUX4 targeting oligonucleotide further comprises a sense strand that hybridizes to the antisense strand.

[0379] In some embodiments, the complex described herein comprises an anti-TfR antibody covalently linked to a molecular payload, wherein the anti-TfR antibody comprises a heavy chain comprising the amino acid sequence of SEQ ID NO: 92, and a light chain comprising the amino acid sequence of SEQ ID NO: 93. In some embodiments, the molecular payload is a DUX4-targeting oligonucleotide comprising an antisense strand comprising a region of complementarity of at least 16 nucleotides to a target sequence in DUX4 mRNA (e.g., a target sequence as set forth in any one of SEQ ID NOs: 163-1574), optionally wherein the antisense strand comprising at least 16 consecutive nucleotides of any one of the antisense sequences as set forth in any one of SEQ ID NOs: 1575-1986, optionally wherein the DUX4 targeting oligonucleotide further comprises a sense strand that hybridizes to the antisense strand. In some embodiments, the molecular payload is a DUX4-targeting oligonucleotide comprising an antisense strand comprising a region of complementarity of at least 16 nucleotides to a target sequence in DUX4 mRNA (e.g., a target sequence listed in Table 8), optionally wherein the antisense strand comprising at least 16 consecutive nucleotides of any one of the antisense sequences listed in Table 8, optionally wherein the DUX4 targeting oligonucleotide further comprises a sense strand that hybridizes to the antisense strand. In some embodiments, the molecular payload is a DUX4-targeting oligonucleotide comprising an antisense strand comprising a region of complementarity of at least 16 nucleotides to a target sequence in DUX4 mRNA (e.g., a target sequence listed in Table 9), optionally wherein the antisense strand comprising at least 16 consecutive nucleotides of any one of the antisense sequences listed in Table 9, optionally wherein the DUX4 targeting oligonucleotide further comprises a sense strand that hybridizes to the antisense strand.

[0380] In some embodiments, the complex described herein comprises an anti-TfR antibody covalently linked to a molecular payload, wherein the anti-TfR antibody comprises a heavy chain comprising the amino acid sequence of SEQ ID NO: 156, and a light chain comprising the amino acid sequence of SEQ ID NO: 157. In some embodiments, the molecular payload is a DUX4-targeting oligonucleotide comprising an antisense strand comprising a region of complementarity of at least 16 nucleotides to a target sequence in DUX4 mRNA (e.g., a target sequence as set forth in any one of SEQ ID NOs: 163-1574), optionally wherein the antisense strand comprising at least 16 consecutive nucleotides of any one of the antisense sequences as set forth in any one of SEQ ID NOs: 1575-1986, optionally wherein the DUX4 targeting oligonucleotide further comprises a sense strand that hybridizes to the antisense strand. In some embodiments, the molecular payload is a DUX4-targeting oligonucleotide comprising an antisense strand comprising a region of complementarity of at least 16 nucleotides to a target sequence in DUX4 mRNA (e.g., a target sequence listed in Table 8), optionally wherein the antisense strand comprising at least 16 consecutive nucleotides of any one of the antisense sequences listed in Table 8, optionally wherein the DUX4 targeting oligonucleotide further comprises a sense strand that hybridizes to the antisense strand. In some embodiments, the molecular payload is a DUX4-targeting oligonucleotide comprising an antisense strand comprising a region of complementarity of at least 16 nucleotides to a target sequence in DUX4 mRNA (e.g., a target sequence listed in Table 9), optionally wherein the antisense strand comprising at least 16 consecutive nucleotides of any one of the antisense sequences listed in Table 9, optionally wherein the DUX4 targeting oligonucleotide further comprises a sense strand that hybridizes to the antisense strand.

[0381] In some embodiments, the complex described herein comprises an anti-TfR antibody covalently linked to a molecular payload, wherein the anti-TfR antibody comprises a heavy chain comprising the amino acid sequence of SEQ ID NO: 97, SEQ ID NO: 98, or SEQ ID NO: 99 and a VL comprising the amino acid sequence of SEQ ID NO: 85. In some embodiments, the molecular payload is a DUX4-targeting oligonucleotide comprising an antisense strand comprising a region of complementarity of at least 16 nucleotides to a target sequence in DUX4 mRNA (e.g., a target sequence as set forth in any one of SEQ ID NOs: 163-1574), optionally wherein the antisense strand comprising at least 16 consecutive nucleotides of any one of the antisense sequences as set forth in any one of SEQ ID NOs: 1575-1986, optionally wherein the DUX4 targeting oligonucleotide further comprises a sense strand that hybridizes to the antisense strand. In some embodiments, the molecular payload is a DUX4-targeting oligonucleotide comprising an antisense strand comprising a region of complementarity of at least 16 nucleotides to a target sequence in DUX4 mRNA (e.g., a target sequence listed in Table 8), optionally wherein the antisense strand comprising at least 16 consecutive nucleotides of any one of the antisense sequences listed in Table 8, optionally wherein the DUX4 targeting oligonucleotide further comprises a sense strand that hybridizes to the antisense strand. In some embodiments, the molecular payload is a DUX4-targeting oligonucleotide comprising an antisense strand comprising a region of complementarity of at least 16 nucleotides to a target sequence in DUX4 mRNA (e.g., a target sequence listed in Table 9), optionally wherein the antisense strand comprising at least 16 consecutive nucleotides of any one of the antisense sequences listed in Table 9, optionally wherein the DUX4 targeting oligonucleotide further comprises a sense strand that hybridizes to the antisense strand.

[0382] In some embodiments, the complex described herein comprises an anti-TfR antibody covalently linked to a molecular payload, wherein the anti-TfR antibody comprises a heavy chain comprising the amino acid sequence of SEQ ID NO: 100 or SEQ ID NO: 101 and a light chain comprising the amino acid sequence of SEQ ID NO: 89. In some embodiments, the molecular payload is a DUX4-targeting oligonucleotide comprising an antisense strand comprising a region of complementarity of at least 16 nucleotides to a target sequence in DUX4 mRNA (e.g., a target sequence as set forth in any one of SEQ ID NOs: 163-1574), optionally wherein the antisense strand comprising at least 16 consecutive nucleotides of any one of the antisense sequences as set forth in any one of SEQ ID NOs: 1575-1986, optionally wherein the DUX4 targeting oligonucleotide further comprises a sense strand that hybridizes to the antisense strand. In some embodiments, the molecular payload is a DUX4-targeting oligonucleotide comprising an antisense strand comprising a region of complementarity of at least 16 nucleotides to a target sequence in DUX4 mRNA (e.g., a target sequence listed in Table 8), optionally wherein the antisense strand comprising at least 16 consecutive nucleotides of any one of the antisense sequences listed in Table 8, optionally wherein the DUX4 targeting oligonucleotide further comprises a sense strand that hybridizes to the antisense strand. In some embodiments, the molecular payload is a DUX4-targeting oligonucleotide comprising an antisense strand comprising a region of complementarity of at least 16 nucleotides to a target sequence in DUX4 mRNA (e.g., a target sequence listed in Table 9), optionally wherein the antisense strand comprising at least 16 consecutive nucleotides of any one of the antisense sequences listed in Table 9, optionally wherein the DUX4 targeting oligonucleotide further comprises a sense strand that hybridizes to the antisense strand.

[0383] In some embodiments, the complex described herein comprises an anti-TfR antibody covalently linked to a molecular payload, wherein the anti-TfR antibody comprises a heavy chain comprising the amino acid sequence of SEQ ID NO: 100 or SEQ ID NO: 101 and a light chain comprising the amino acid sequence of SEQ ID NO: 90. In some embodiments, the molecular payload is a DUX4-targeting oligonucleotide comprising an antisense strand comprising a region of complementarity of at least 16 nucleotides to a target sequence in DUX4 mRNA (e.g., a target sequence as set forth in any one of SEQ ID NOs: 163-1574), optionally wherein the antisense strand comprising at least 16 consecutive nucleotides of any one of the antisense sequences as set forth in any one of SEQ ID NOs: 1575-1986, optionally wherein the DUX4 targeting oligonucleotide further comprises a sense strand that hybridizes to the antisense strand. In some embodiments, the molecular payload is a DUX4-targeting oligonucleotide comprising an antisense strand comprising a region of complementarity of at least 16 nucleotides to a target sequence in DUX4 mRNA (e.g., a target sequence listed in Table 8), optionally wherein the antisense strand comprising at least 16 consecutive nucleotides of any one of the antisense sequences listed in Table 8, optionally wherein the DUX4 targeting oligonucleotide further comprises a sense strand that hybridizes to the antisense strand. In some embodiments, the molecular payload is a DUX4-targeting oligonucleotide comprising an antisense strand comprising a region of complementarity of at least 16 nucleotides to a target sequence in DUX4 mRNA (e.g., a target sequence listed in Table 9), optionally wherein the antisense strand comprising at least 16 consecutive nucleotides of any one of the antisense sequences listed in Table 9, optionally wherein the DUX4 targeting oligonucleotide further comprises a sense strand that hybridizes to the antisense strand.

[0384] In some embodiments, the complex described herein comprises an anti-TfR antibody covalently linked to a molecular payload, wherein the anti-TfR antibody comprises a heavy chain comprising the amino acid sequence of SEQ ID NO: 102 and a light chain comprising the amino acid sequence of SEQ ID NO: 93. In some embodiments, the molecular payload is a DUX4-targeting oligonucleotide comprising an antisense strand comprising a region of complementarity of at least 16 nucleotides to a target sequence in DUX4 mRNA (e.g., a target sequence as set forth in any one of SEQ ID NOs: 163-1574), optionally wherein the antisense strand comprising at least 16 consecutive nucleotides of any one of the antisense sequences as set forth in any one of SEQ ID NOs: 1575-1986, optionally wherein the DUX4 targeting oligonucleotide further comprises a sense strand that hybridizes to the antisense strand. In some embodiments, the molecular payload is a DUX4-targeting oligonucleotide comprising an antisense strand comprising a region of complementarity of at least 16 nucleotides to a target sequence in DUX4 mRNA (e.g., a target sequence listed in Table 8), optionally wherein the antisense strand comprising at least 16 consecutive nucleotides of any one of the antisense sequences listed in Table 8, optionally wherein the DUX4 targeting oligonucleotide further comprises a sense strand that hybridizes to the antisense strand. In some embodiments, the molecular payload is a DUX4-targeting oligonucleotide comprising an antisense strand comprising a region of complementarity of at least 16 nucleotides to a target sequence in DUX4 mRNA (e.g., a target sequence listed in Table 9), optionally wherein the antisense strand comprising at least 16 consecutive nucleotides of any one of the antisense sequences listed in Table 9, optionally wherein the DUX4 targeting oligonucleotide further comprises a sense strand that hybridizes to the antisense strand.

[0385] In some embodiments, the complex described herein comprises an anti-TfR antibody covalently linked to a molecular payload, wherein the anti-TfR antibody comprises a heavy chain comprising the amino acid sequence of SEQ ID NO: 102 or SEQ ID NO: 103 and a light chain comprising the amino acid sequence of SEQ ID NO: 95. In some embodiments, the molecular payload is a DUX4-targeting oligonucleotide comprising an antisense strand comprising a region of complementarity of at least 16 nucleotides to a target sequence in DUX4 mRNA (e.g., a target sequence as set forth in any one of SEQ ID NOs: 163-1574), optionally wherein the antisense strand comprising at least 16 consecutive nucleotides of any one of the antisense sequences as set forth in any one of SEQ ID NOs: 1575-1986, optionally wherein the DUX4 targeting oligonucleotide further comprises a sense strand that hybridizes to the antisense strand. In some embodiments, the molecular payload is a DUX4-targeting oligonucleotide comprising an antisense strand comprising a region of complementarity of at least 16 nucleotides to a target sequence in DUX4 mRNA (e.g., a target sequence listed in Table 8), optionally wherein the antisense strand comprising at least 16 consecutive nucleotides of any one of the antisense sequences listed in Table 8, optionally wherein the DUX4 targeting oligonucleotide further comprises a sense strand that hybridizes to the antisense strand. In some embodiments, the molecular payload is a DUX4-targeting oligonucleotide comprising an antisense strand comprising a region of complementarity of at least 16 nucleotides to a target sequence in DUX4 mRNA (e.g., a target sequence listed in Table 9), optionally wherein the antisense strand comprising at least 16 consecutive nucleotides of any one of the antisense sequences listed in Table 9, optionally wherein the DUX4 targeting oligonucleotide further comprises a sense strand that hybridizes to the antisense strand.

[0386] In some embodiments, the complex described herein comprises an anti-TfR antibody covalently linked to a molecular payload, wherein the anti-TfR antibody comprises a heavy chain comprising the amino acid sequence of SEQ ID NO: 158 or SEQ ID NO: 159 and a light chain comprising the amino acid sequence of SEQ ID NO: 157. In some embodiments, the molecular payload is a DUX4-targeting oligonucleotide comprising an antisense strand comprising a region of complementarity of at least 16 nucleotides to a target sequence in DUX4 mRNA (e.g., a target sequence as set forth in any one of SEQ ID NOs: 163-1574), optionally wherein the antisense strand comprising at least 16 consecutive nucleotides of any one of the antisense sequences as set forth in any one of SEQ ID NOs: 1575-1986, optionally wherein the DUX4 targeting oligonucleotide further comprises a sense strand that hybridizes to the antisense strand. In some embodiments, the molecular payload is a DUX4-targeting oligonucleotide comprising an antisense strand comprising a region of complementarity of at least 16 nucleotides to a target sequence in DUX4 mRNA (e.g., a target sequence listed in Table 8), optionally wherein the antisense strand comprising at least 16 consecutive nucleotides of any one of the antisense sequences listed in Table 8, optionally wherein the DUX4 targeting oligonucleotide further comprises a sense strand that hybridizes to the antisense strand. In some embodiments, the molecular payload is a DUX4-targeting oligonucleotide comprising an antisense strand comprising a region of complementarity of at least 16 nucleotides to a target sequence in DUX4 mRNA (e.g., a target sequence listed in Table 9), optionally wherein the antisense strand comprising at least 16 consecutive nucleotides of any one of the antisense sequences listed in Table 9, optionally wherein the DUX4 targeting oligonucleotide further comprises a sense strand that hybridizes to the antisense strand.

[0387] In some embodiments, the molecular payload is a DUX4-targeting oligonucleotide (e.g., a DUX4-targeting oligonucleotide listed in Table 8). In some embodiments, the molecular payload is a DUX4-targeting oligonucleotide (e.g., a DUX4-targeting oligonucleotide listed in Table 9).

[0388] In any of the example complexes described herein, in some embodiments, the anti-TfR antibody is linked to the molecular payload having a structure of formula (C):

[chemical structure]

wherein n is 3, m is 4, X is NH (e.g., NH from an amine group of a lysine), and L1 is any one of the spacers described herein.

[0389] In some embodiments, the complex described herein comprises an anti-TfR antibody covalently linked to the 3′ or 5′ end of a DUX4-targeting oligonucleotide (e.g., the sense or antisense strand of a DUX4-targeting oligonucleotide listed in Table 8) via a lysine in the anti-TfR antibody, wherein the anti-TfR antibody comprises a CDR-H1, a CDR-H2, a CDR-H3, a CDR-L1, a CDR-L2, and a CDR-L3 of any one of the antibodies listed in Table 2, wherein the complex has a structure of formula (D):

[chemical structure]

wherein n is 3 and m is 4, and wherein L1 is any one of the spacers described herein. In some embodiments, the anti-TfR antibody is covalently linked to the 5′ end of the sense strand of a DUX4-targeting oligonucleotide. In some embodiments, the anti-TfR antibody is covalently linked to the 3′ end of the sense strand of a DUX4-targeting oligonucleotide. In some embodiments, L1 is

[chemical structure]

[0390] In some embodiments, the complex described herein comprises an anti-TfR antibody covalently linked to the 3′ or 5′ end of a DUX4-targeting oligonucleotide (e.g., the sense or antisense strand of a DUX4-targeting oligonucleotide listed in Table 8) via a lysine in the anti-TfR antibody, wherein the anti-TfR antibody comprises a VH and VL of any one of the antibodies listed in Table 3, wherein the complex has a structure of formula (D):

[chemical structure]

wherein n is 3 and m is 4, and wherein L1 is any one of the spacers described herein. In some embodiments, the anti-TfR antibody is covalently linked to the 5′ end of the sense strand of a DUX4-targeting oligonucleotide. In some embodiments, the anti-TfR antibody is covalently linked to the 3′ end of the sense strand of a DUX4-targeting oligonucleotide. In some embodiments, L1 is

[chemical structure]

[0391] In some embodiments, the complex described herein comprises an anti-TfR antibody covalently linked to the 3′ or 5′ end of a DUX4-targeting oligonucleotide (e.g., the sense or antisense strand of a DUX4-targeting oligonucleotide listed in Table 8) via a lysine in the anti-TfR antibody, wherein the anti-TfR antibody comprises a heavy chain and light chain of any one of the antibodies listed in Table 4, wherein the complex has a structure of formula (D):

[chemical structure]

wherein n is 3 and m is 4, and wherein L1 is any one of the spacers described herein. In some embodiments, the anti-TfR antibody is covalently linked to the 5′ end of the sense strand of a DUX4-targeting oligonucleotide. In some embodiments, the anti-TfR antibody is covalently linked to the 3′ end of the sense strand of a DUX4-targeting oligonucleotide. In some embodiments, L1 is

[chemical structure]

[0392] In some embodiments, the complex described herein comprises an anti-TfR antibody that is a Fab covalently linked to the 3′ or 5′ end of a DUX4-targeting oligonucleotide (e.g., the sense or antisense strand of a DUX4-targeting oligonucleotide listed in Table 8) via a lysine in the anti-TfR Fab, wherein the anti-TfR Fab comprises a heavy chain and light chain of any one of the antibodies listed in Table 5, wherein the complex has a structure of formula (D):

[chemical structure]

wherein n is 3 and m is 4, and wherein L1 is any one of the spacers described herein. In some embodiments, the anti-TfR antibody is covalently linked to the 5′ end of the sense strand of a DUX4-targeting oligonucleotide. In some embodiments, the anti-TfR antibody is covalently linked to the 3′ end of the sense strand of a DUX4-targeting oligonucleotide. In some embodiments, L1 is

[chemical structure]

[0393] In some embodiments, L1 is linked to a 3′ phosphate of the oligonucleotide.

[0394] In some embodiments, the complex described herein comprises an anti-TfR antibody covalently linked to the 3′ or 5′ end of a DUX4-targeting oligonucleotide (e.g., the sense or antisense strand of a DUX4-targeting oligonucleotide listed in Table 9) via a lysine in the anti-TfR antibody, wherein the anti-TfR antibody comprises a CDR-H1, a CDR-H2, a CDR-H3, a CDR-L1, a CDR-L2, and a CDR-L3 of any one of the antibodies listed in Table 2, wherein the complex has a structure of formula (D):

[chemical structure]

wherein n is 3 and m is 4, and wherein L1 is any one of the spacers described herein. In some embodiments, the anti-TfR antibody is covalently linked to the 5′ end of the sense strand of a DUX4-targeting oligonucleotide. In some embodiments, the anti-TfR antibody is covalently linked to the 3′ end of the sense strand of a DUX4-targeting oligonucleotide. In some embodiments, L1 is

[chemical structure]

[0395] In some embodiments, the complex described herein comprises an anti-TfR antibody covalently linked to the 3′ or 5′ end of a DUX4-targeting oligonucleotide (e.g., the sense or antisense strand of a DUX4-targeting oligonucleotide listed in Table 9) via a lysine in the anti-TfR antibody, wherein the anti-TfR antibody comprises a VH and VL of any one of the antibodies listed in Table 3, wherein the complex has a structure of formula (D):

[chemical structure]

wherein n is 3 and m is 4, and wherein L1 is any one of the spacers described herein. In some embodiments, the anti-TfR antibody is covalently linked to the 5′ end of the sense strand of a DUX4-targeting oligonucleotide. In some embodiments, the anti-TfR antibody is covalently linked to the 3′ end of the sense strand of a DUX4-targeting oligonucleotide. In some embodiments, L1 is

[chemical structure]

[0396] In some embodiments, the complex described herein comprises an anti-TfR antibody covalently linked to the 3′ or 5′ end of a DUX4-targeting oligonucleotide (e.g., the sense or antisense strand of a DUX4-targeting oligonucleotide listed in Table 9) via a lysine in the anti-TfR antibody, wherein the anti-TfR antibody comprises a heavy chain and light chain of any one of the antibodies listed in Table 4, wherein the complex has a structure of formula (D):

[chemical structure]

wherein n is 3 and m is 4, and wherein L1 is any one of the spacers described herein. In some embodiments, the anti-TfR antibody is covalently linked to the 5′ end of the sense strand of a DUX4-targeting oligonucleotide. In some embodiments, the anti-TfR antibody is covalently linked to the 3′ end of the sense strand of a DUX4-targeting oligonucleotide. In some embodiments, L1 is

[chemical structure]

[0397] In some embodiments, the complex described herein comprises an anti-TfR antibody that is a Fab covalently linked to the 3′ or 5′ end of a DUX4-targeting oligonucleotide (e.g., the sense or antisense strand of a DUX4-targeting oligonucleotide listed in Table 9) via a lysine in the anti-TfR Fab, wherein the anti-TfR Fab comprises a heavy chain and light chain of any one of the antibodies listed in Table 5, wherein the complex has a structure of formula (D):

[chemical structure]

wherein n is 3 and m is 4, and wherein L1 is any one of the spacers described herein. In some embodiments, the anti-TfR antibody is covalently linked to the 5′ end of the sense strand of a DUX4-targeting oligonucleotide. In some embodiments, the anti-TfR antibody is covalently linked to the 3′ end of the sense strand of a DUX4-targeting oligonucleotide. In some embodiments, L1 is

[chemical structure]

[0398] In some embodiments, the complex described herein comprises an anti-TfR antibody covalently linked to the 3′ or 5′ end of a DUX4-targeting oligonucleotide (e.g., the sense or antisense strand of a DUX4-targeting oligonucleotide listed in Table 8 or Table 9) via a lysine in the anti-TfR antibody, wherein the anti-TfR antibody comprises:
[0399] (i) a CDR-H1 comprising the amino acid sequence of SEQ ID NO: 27, a CDR-H2 comprising the amino acid sequence of SEQ ID NO: 28, a CDR-H3 comprising the amino acid sequence of SEQ ID NO: 29, a CDR-L1 comprising the amino acid sequence of SEQ ID NO: 30, a CDR-L2 comprising the amino acid sequence of SEQ ID NO: 31, and a CDR-L3 comprising the amino acid sequence of SEQ ID NO: 32;
[0400] (ii) a CDR-H1 comprising the amino acid sequence of SEQ ID NO: 33, a CDR-H2 comprising the amino acid sequence of SEQ ID NO: 34, a CDR-H3 comprising the amino acid sequence of SEQ ID NO: 35, a CDR-L1 comprising the amino acid sequence of SEQ ID NO: 36, a CDR-L2 comprising the amino acid sequence of SEQ ID NO: 37, and a CDR-L3 comprising the amino acid sequence of SEQ ID NO: 32; or
[0401] (ii) a CDR-H1 comprising the amino acid sequence of SEQ ID NO: 38, a CDR-H2 comprising the amino acid sequence of SEQ ID NO: 39, a CDR-H3 comprising the amino acid sequence of SEQ ID NO: 40, a CDR-L1 comprising the amino acid sequence of SEQ ID NO: 41, a CDR-L2 comprising the amino acid sequence of SEQ ID NO: 31, and a CDR-L3 comprising the amino acid sequence of SEQ ID NO: 42,
[0402] wherein the complex has a structure of formula (D):

[chemical structure]

wherein n is 3 and m is 4, and wherein L1 is any one of the spacers described herein. In some embodiments, the anti-TfR antibody is covalently linked to the 5′ end of the sense strand of a DUX4-targeting oligonucleotide. In some embodiments, the anti-TfR antibody is covalently linked to the 3′ end of the sense strand of a DUX4-targeting oligonucleotide. In some embodiments, L1 is

[chemical structure]

[0403] In some embodiments, the complex described herein comprises an anti-TfR antibody covalently linked to the 3′ or 5′ end of a DUX4-targeting oligonucleotide (e.g., the sense or antisense strand of a DUX4-targeting oligonucleotide listed in Table 8 or Table 9) via a lysine in the anti-TfR antibody, wherein the anti-TfR antibody a VH comprising the amino acid sequence of SEQ ID NO: 76, and a VL comprising the amino acid sequence of SEQ ID NO: 75, wherein the complex has a structure of formula (D):

[chemical structure]

wherein n is 3 and m is 4, and wherein L1 is any one of the spacers described herein. In some embodiments, the anti-TfR antibody is covalently linked to the 5′ end of the sense strand of a DUX4-targeting oligonucleotide. In some embodiments, the anti-TfR antibody is covalently linked to the 3′ end of the sense strand of a DUX4-targeting oligonucleotide. In some embodiments, L1 is

[chemical structure]

[0404] In some embodiments, the complex described herein comprises an anti-TfR antibody that is a Fab covalently linked to the 3′ or 5′ end of a DUX4-targeting oligonucleotide (e.g., the sense or antisense strand of a DUX4-targeting oligonucleotide listed in Table 8 or Table 9) via a lysine in the anti-TfR Fab, wherein the anti-TfR Fab comprises a heavy chain comprising the amino acid sequence of SEQ ID NO: 101 and a light chain comprising the amino acid sequence of SEQ ID NO: 90, wherein the complex has a structure of formula (D):

[chemical structure]

wherein n is 3 and m is 4, and wherein L1 is any one of the spacers described herein. In some embodiments, the anti-TfR antibody is covalently linked to the 5′ end of the sense strand of a DUX4-targeting oligonucleotide. In some embodiments, the anti-TfR antibody is covalently linked to the 3′ end of the sense strand of a DUX4-targeting oligonucleotide. In some embodiments, L1 is

[chemical structure]

[0405] In some embodiments, L1 is linked to a 5′ phosphate of the oligonucleotide. In some embodiments, the linkage of L1 to a 5′ phosphate of the oligonucleotide forms a phosphodiester bond between L1 and the oligonucleotide.

[0406] In some embodiments, L1 is linked to a 3′ phosphate of the oligonucleotide. In some embodiments, the linkage of L1 to a 3′ phosphate of the oligonucleotide forms a phosphodiester bond between L1 and the oligonucleotide.

### III. Formulations

[0407] Complexes provided herein may be formulated in any suitable manner. Generally, complexes provided herein are formulated in a manner suitable for pharmaceutical use. For example, complexes can be delivered to a subject using a formulation that minimizes degradation, facilitates delivery and/or (e.g., and) uptake, or provides another beneficial property to the complexes in the formulation. In some embodiments, provided herein are compositions comprising complexes and pharmaceutically acceptable carriers. Such compositions can be suitably formulated such that when administered to a subject, either into the immediate environment of a target cell or systemically, a sufficient amount of the complexes enter target muscle cells. In some embodiments, complexes are formulated in buffer solutions such as phosphate-buffered saline solutions, liposomes, micellar structures, and capsids.

[0408] It should be appreciated that, in some embodiments, compositions may include separately one or more components of complexes provided herein (e.g., muscle-targeting agents, linkers, molecular payloads, or precursor molecules of any one of them).

[0409] In some embodiments, complexes are formulated in water or in an aqueous solution (e.g., water with pH adjustments). In some embodiments, complexes are formulated in basic buffered aqueous solutions (e.g., PBS). In some embodiments, formulations as disclosed herein comprise an excipient. In some embodiments, an excipient confers to a composition improved stability, improved absorption, improved solubility and/or (e.g., and) therapeutic enhancement of the active ingredient. In some embodiments, an excipient is a buffering agent (e.g., sodium citrate, sodium phosphate, a tris base, or sodium hydroxide) or a vehicle (e.g., a buffered solution, petrolatum, dimethyl sulfoxide, or mineral oil).

[0410] In some embodiments, a complex or component thereof (e.g., oligonucleotide or antibody) is lyophilized for extending its shelf-life and then made into a solution before use (e.g., administration to a subject). Accordingly, an excipient in a composition comprising a complex, or component thereof, described herein may be a lyoprotectant (e.g., mannitol, lactose, polyethylene glycol, or polyvinyl pyrolidone), or a collapse temperature modifier (e.g., dextran, ficoll, or gelatin).

[0411] In some embodiments, a pharmaceutical composition is formulated to be compatible with its intended route of administration. Examples of routes of administration include parenteral, e.g., intravenous, intradermal, subcutaneous administration. Typically, the route of administration is intravenous or subcutaneous.

[0412] Pharmaceutical compositions suitable for injectable use include sterile aqueous solutions (where water soluble) or dispersions and sterile powders for the extemporaneous preparation of sterile injectable solutions or dispersions. The carrier can be a solvent or dispersion medium containing, for example, water, ethanol, polyol (for example, glycerol, propylene glycol, and liquid polyethylene glycol, and the like), and suitable mixtures thereof. In some embodiments, formulations include isotonic agents, for example, sugars, polyalcohols such as mannitol, sorbitol, and sodium chloride in the composition. Sterile injectable solutions can be prepared by incorporating the complexes in a required amount in a selected solvent with one or a combination of ingredients enumerated above, as required, followed by filtered sterilization.

[0413] In some embodiments, a composition may contain at least about 0.1% of the complex, or component thereof, or more, although the percentage of the active ingredient(s) may be between about 1% and about 80% or more of the weight or volume of the total composition. Factors such as solubility, bioavailability, biological half-life, route of administration, product shelf life, as well as other pharmacological considerations will be contemplated by one skilled in the art of preparing such pharmaceutical formulations, and as such, a variety of dosages and treatment regimens may be desirable.

### IV. Methods of Use/Treatment

[0414] Complexes comprising a muscle-targeting agent covalently linked to a molecular payload as described herein are effective in treating FSHD. In some embodiments, complexes are effective in treating Type 1 FSHD. In some embodiments, complexes are effective in treating Type 2 FSHD. In some embodiments, FSHD is associated with deletions in D4Z4 repeat regions on chromosome 4 which contain the DUX4 gene. In some embodiments, FSHD is associated with mutations in the SMCHD1 gene.

[0415] In some embodiments, a subject may be a human subject, a non-human primate subject, a rodent subject, or any suitable mammalian subject. In some embodiments, a subject may have myotonic dystrophy. In some embodiments, a subject has elevated expression of the DUX4 gene outside of fetal development and the testes. In some embodiments, the subject has facioscapulohumeral muscular dystrophy of Type 1 or Type 2. In some embodiments, the subject having FSHD has mutations in the SMCHD1 gene. In some embodiments, the subject having FSHD has deletion mutations in D4Z4 repeat regions on chromosome 4.

[0416] An aspect of the disclosure includes methods involving administering to a subject an effective amount of a complex as described herein. In some embodiments, an effective amount of a pharmaceutical composition that comprises a complex comprising a muscle-targeting agent covalently linked to a molecular payload can be administered to a subject in need of treatment. In some embodiments, a pharmaceutical composition comprising a complex as described herein may be administered by a suitable route, which may include intravenous administration, e.g., as a bolus or by continuous infusion over a period of time. In some embodiments, intravenous administration may be performed by intramuscular, intraperitoneal, intracerebrospinal, subcutaneous, intra-articular, intrasynovial, or intrathecal routes. In some embodiments, a pharmaceutical composition may be in solid form, aqueous form, or a liquid form. In some embodiments, an aqueous or liquid form may be nebulized or lyophilized. In some embodiments, a nebulized or lyophilized form may be reconstituted with an aqueous or liquid solution.

[0417] Compositions for intravenous administration may contain various carriers such as vegetable oils, dimethylactamide, dimethyformamide, ethyl lactate, ethyl carbonate, isopropyl myristate, ethanol, and polyols (glycerol, propylene glycol, liquid polyethylene glycol, and the like). For intravenous injection, water soluble antibodies can be administered by the drip method, whereby a pharmaceutical formulation containing the antibody and a physiologically acceptable excipients is infused. Physiologically acceptable excipients may include, for example, 5% dextrose, 0.9% saline, Ringer's solution or other suitable excipients. Intramuscular preparations, e.g., a sterile formulation of a suitable soluble salt form of the antibody, can be dissolved and administered in a pharmaceutical excipient such as Water-for-Injection, 0.9% saline, or 5% glucose solution.

[0418] In some embodiments, a pharmaceutical composition that comprises a complex comprising a muscle-targeting agent covalently linked to a molecular payload is administered via site-specific or local delivery techniques. Examples of these techniques include implantable depot sources of the complex, local delivery catheters, site specific carriers, direct injection, or direct application.

[0419] In some embodiments, a pharmaceutical composition that comprises a complex comprising a muscle-targeting agent covalently linked to a molecular payload is administered at an effective concentration that confers therapeutic effect on a subject. Effective amounts vary, as recognized by those skilled in the art, depending on the severity of the disease, unique characteristics of the subject being treated, e.g. age, physical conditions, health, or weight, the duration of the treatment, the nature of any concurrent therapies, the route of administration and related factors. These related factors are known to those in the art and may be addressed with no more than routine experimentation. In some embodiments, an effective concentration is the maximum dose that is considered to be safe for the patient. In some embodiments, an effective concentration will be the lowest possible concentration that provides maximum efficacy.

[0420] Empirical considerations, e.g. the half-life of the complex in a subject, generally will contribute to determination of the concentration of pharmaceutical composition that is used for treatment. The frequency of administration may be empirically determined and adjusted to maximize the efficacy of the treatment.

[0421] Generally, for administration of any of the complexes described herein, an initial candidate dosage may be about 1 to 100 mg/kg, or more, depending on the factors described above, e.g. safety or efficacy. In some embodiments, a treatment will be administered once. In some embodiments, a treatment will be administered daily, biweekly, weekly, bimonthly, monthly, or at any time interval that provide maximum efficacy while minimizing safety risks to the subject. Generally, the efficacy and the treatment and safety risks may be monitored throughout the course of treatment.

[0422] The efficacy of treatment may be assessed using any suitable methods. In some embodiments, the efficacy of treatment may be assessed by evaluation of observation of symptoms associated with FSHD including muscle mass loss and muscle atrophy, primarily in the muscles of the face, shoulder blades, and upper arms.

[0423] In some embodiments, a pharmaceutical composition that comprises a complex comprising a muscle-targeting agent covalently linked to a molecular payload described herein is administered to a subject at an effective concentration sufficient to inhibit activity or expression of a target gene by at least 10%, at least 20%, at least 30%, at least 40%, at least 50%, at least 60%, at least 70%, at least 80%, at least 90% or at least 95% relative to a control, e.g. baseline level of gene expression prior to treatment.

[0424] In some embodiments, a single dose or administration of a pharmaceutical composition that comprises a complex comprising a muscle-targeting agent covalently linked to a molecular payload described herein to a subject is sufficient to inhibit activity or expression of a target gene for at least 1-5, 1-10, 5-15, 10-20, 15-30, 20-40, 25-50, or more days. In some embodiments, a single dose or administration of a pharmaceutical composition that comprises a complex comprising a muscle-targeting agent covalently linked to a molecular payload described herein to a subject is sufficient to inhibit activity or expression of a target gene for at least 1, 2, 3, 4, 5, 6, 7, 8, 9, 10, 11, or 12 weeks. In some embodiments, a single dose or administration of a pharmaceutical composition that comprises a complex comprising a muscle-targeting agent covalently linked to a molecular payload described herein to a subject is sufficient to inhibit activity or expression of a target gene for at least 1, 2, 3, 4, 5, or 6 months.

[0425] In some embodiments, a pharmaceutical composition may comprise more than one complex comprising a muscle-targeting agent covalently linked to a molecular payload. In some embodiments, a pharmaceutical composition may further comprise any other suitable therapeutic agent for treatment of a subject, e.g. a human subject having FSHD. In some embodiments, the other therapeutic agents may enhance or supplement the effectiveness of the complexes described herein. In some embodiments, the other therapeutic agents may function to treat a different symptom or disease than the complexes described herein.

### EXAMPLES

### Example 1: Targeting Gene Expression with Transfected Antisense Oligonucleotides

[0426] A siRNA that targets hypoxanthine phosphoribosyltransferase (HPRT) was tested in vitro for its ability to reduce expression levels of HPRT in an immortalized cell line. Briefly, Hepa 1-6 cells were transfected with either a control siRNA (siCTRL; 100 nM) or the siRNA that targets HPRT (siHPRT; 100 nM), formulated with lipofectamine 2000. HPRT expression levels were evaluated 48 hours following transfection. A control experiment was also performed in which vehicle (phosphate-buffered saline) was delivered to Hepa 1-6 cells in culture and the cells were maintained for 48 hours. As shown in FIG. 1, it was found that the HPRT siRNA reduced HPRT expression levels by about 90% compared with controls. Sequences of the siRNAs used are provided in Table 10.

TABLE 10
Sequences of siHPRT and siCTRL

| | Sequence | SEQ ID NO: |
|---|---|---|
| siHPRT sense | 5′-UcCuAuGaCuGuAgA | 3067 |
| strand | uUuUaU-(CH₂)₆NH₂-3′ | |
| siHPRT antisense | 5′-aUaAaAuCuAcAgUc | 3068 |
| strand | AuAgGasAsu-3′ | |
| siCTRL sense | 5′-UgUaAuAaCcAuAuCu | 3069 |
| strand | AcCuU-(CH₂)₆NH₂-3′ | |
| siCTRL antisense | 5′-aAgGuAgAuAuGgUuA | 3070 |
| strand | uUaCasAsa-3′ | |

*Lower case-2′ O-Me ribonucleosides′; Capital letter-2′ Fluoro ribonucleosides; s-phosphorothioate linkage

### Example 2: Targeting HPRT with a Muscle-Targeting Complex

[0427] A muscle-targeting complex was generated comprising the HPRT siRNA used in Example 1 (siHPRT) covalently linked, via a non-cleavable N-gamma-maleimidobutyryl-oxysuccinimide ester (GMBS) linker, to DTX-A-002, an anti-transferrin receptor antibody. DTX-A-002 is RI7 217 anti-TfR1 Fab.

[0428] Briefly, the GMBS linker was dissolved in dry DMSO and coupled to the 3′ end of the sense strand of siHPRT through amide bond formation under aqueous conditions. Completion of the reaction was verified by Kaiser test. Excess linker and organic solvents were removed by gel permeation chromatography. The purified, maleimide functionalized sense strand of siHPRT was then coupled to DTX-A-002 antibody using a Michael addition reaction.

[0429] The product of the antibody coupling reaction was then subjected to hydrophobic interaction chromatography (HIC-HPLC). antiTfR-siHPRT complexes comprising one or two siHPRT molecules covalently attached to DTX-A-002 antibody were purified. Densitometry confirmed that the purified sample of complexes had an average siHPRT to antibody ratio of 1.46. SDS-PAGE analysis demonstrated that >90% of the purified sample of complexes comprised DTX-A-002 linked to either one or two siHPRT molecules.

[0430] Using the same methods as described above, a control IgG2a-siHPRT complex was generated comprising the HPRT siRNA used in Example 1 (siHPRT) covalently linked via the GMBS linker to an IgG2a (Fab) antibody (DTX-A-003). Densitometry confirmed that DTX-C-001 (the IgG2a-siHPRT complex) had an average siHPRT to antibody ratio of 1.46 and SDS-PAGE demonstrated that >90% of the purified sample of control complexes comprised DTX-A-003 linked to either one or two siHPRT molecules.

[0431] The antiTfR-siHPRT complex was then tested for cellular internalization and inhibition of HPRT in cellulo. Hepa 1-6 cells, which have relatively high expression levels of transferrin receptor, were incubated in the presence of vehicle (phosphate-buffered saline), IgG2a-siHPRT (100 nM), antiTfR-siCTRL (100 nM), or antiTfR-siHPRT (100 nM), for 72 hours. After the 72 hour incubation, the cells were isolated and assayed for expression levels of HPRT (FIG. 2). Cells treated with the antiTfR-siHPRT demonstrated a reduction in HPRT expression by ˜50% relative to the cells treated with the vehicle control and to those treated with the IgG2a-siHPRT complex. Meanwhile, cells treated with either of the IgG2a-siHPRT or antiTfR-siCTRL had HPRT expression levels comparable to the vehicle control (no reduction in HPRT expression). These data indicate that the anti-transferrin receptor antibody of the antiTfR-siHPRT enabled cellular internalization of the complex, thereby allowing the siHPRT to inhibit expression of HPRT.

### Example 3: Targeting HPRT in Mouse Muscle Tissues with a Muscle-Targeting Complex

[0432] The muscle-targeting complex described in Example 2, antiTfR-siHPRT, was tested for inhibition of HPRT in mouse tissues. C57BL/6 wild-type mice were intravenously injected with a single dose of a vehicle control (phosphate-buffered saline); siHPRT (2 mg/kg of siRNA); IgG2a-siHPRT (2 mg/kg of siRNA, corresponding to 9 mg/kg antibody complex); or antiTfR-siHPRT (2 mg/kg of siRNA, corresponding to 9 mg/kg antibody complex. Each experimental condition was replicated in four individual C57BL/6 wild-type mice. Following a three-day period after injection, the mice were euthanized and segmented into isolated tissue types. Individual tissue samples were subsequently assayed for expression levels of HPRT (FIGS. 3A-3B and 4A-4E).

[0433] Mice treated with the antiTfR-siHPRT complex demonstrated a reduction in HPRT expression in gastrocnemius (31% reduction; p<0.05) and heart (30% reduction; p<0.05), relative to the mice treated with the siHPRT control (FIGS. 3A-3B). Meanwhile, mice treated with the IgG2a-siHPRT complex had IHPRT expression levels comparable to the siHPRT control (little or no reduction in IHPRT expression) for all assayed muscle tissue types.

[0434] Mice treated with the antiTfR-siHPRT complex demonstrated no change in HPRT expression in non-muscle tissues such as brain, liver, lung, kidney, and spleen tissues (FIGS. 4A-4E).

[0435] These data indicate that the anti-transferrin receptor antibody of the antiTfR-siHPRT complex enabled cellular internalization of the complex into muscle-specific tissues in an in vivo mouse model, thereby allowing the siHPRT to inhibit expression of HPRT. These data further demonstrate that the antiTfR-oligonucleotide complexes of the current disclosure are capable of specifically targeting muscle tissues.

### Example 4: DUX4 Targeting siRNAs

[0436] siRNAs targeting DUX4 reference mRNA were designed. The reference DUX4 mRNA is NM_001293798.2 (SEQ ID NO: 160). The target regions include 19 consecutive nucleotides of the reference DUX4 mRNA. The target sequences are set forth in SEQ ID NOs: 163-1574 and the antisense sequences targeting these target sequences are set forth in SEQ ID NOs: 1575-2986.

[0437] In silico analysis was performed on the designed sequences and various parameters were applied to select the candidate target and antisense sequences for subsequent siRNA design. Forty siRNAs were designed for subsequent studies and are listed in Table 8. The forty synthesized siRNAs contain 2′-O-methyl (2′-O-Me) and 2′-fluoro (2′-F) modifications with phosphorothioate internucleoside linkages.

[0438] A DualGlo reporter-plasmid was designed for screening the siRNAs. The plasmid contains coding sequence for the human DUX4 mRNA in the 3′-UTR of a reporter luciferase.

[0439] Each of the 40 siRNAs (at a concentration of 2 nM or 10 nM) and the DualGlo reporter plasmid were cotransfected into Hepa1-6 cells. All transfections were conducted in quadruplicate for each data point. Twenty-four hours post transfection, Renilla luciferase and Firefly luciferase (to normalize for transfection efficacy) activity were determined. siRNAs activities were calculated relative to the cells treated with control siRNAs. The knockdown activity of each siRNA is shown in FIG. 5A. The siRNA numbers in FIG. 5A correspond to the siRNA numbers in Table 8.

[0440] A dose response curve was also generated for siRNA No. 9 (corresponding to siRNA9 in Table 8 using the same assay described above but using 10 different siRNA concentrations (0.38 pM, 1.52 pM, 6.10 pM, 24.41 pM, 97.65 pM, 0.39 nM, 1.56 nM, 6.25 nM, 25 nM, 100 nM). siRNA9 has an IC50 value of 176 pM. (FIG. 5B).

### Example 5: Activities of DUX4-Targeting siRNAs in FSHD Patient Myotubes

[0441] DUX4-targeting siRNAs were tested for their activities in knocking down MBD3L2 mRNA in FSHD patient myotubes. MBD3L2 is a DUX4 transcriptome marker. AB1080 (C6) immortalized FSHD patient-derived myotubes were transfected with varying concentrations from 0.2 pM to 200 nM (0.2 pM, 2 pM, 20 pM, 0.2 nM, 2 nM, 20 nM, and 200 nM) of either a vehicle control (phosphate-buffered saline), or a DUX4 targeting siRNA selected from siRNA9, siRNA14, siRNA35, siRNA13, siRNA15, siRNA1, siRNA26, and siRNA18 formulated with lipofectamine 2000. The siRNA numbers correspond to the siRNA numbers in Table 8. After transfection, cells were maintained for five days. MBD3L2 mRNA expression levels were subsequently measured in the treated myotubes. Dose response curves for reduction of MBD3L2 mRNA are shown in FIGS. 6A-6H.

### Example 6: Activities of DUX4-Targeting siRNA Conjugates in FSHD Patient Myotubes

[0442] Activities of conjugates containing an anti-TfR Fab 3M12 VH4/Vκ3 covalently linked to an DUX4-targeting siRNA were tested in AB1080 immortalized FSHD patient-derived myotubes. In the conjugates, the anti-TfR Fab is covalently linked to the 3′ end of the sense strand of each siRNA via a linker, and the corresponding antisense strand is annealed to the sense strand. The siRNAs tested are siRNA9, siRNA14, or siRNA35 (corresponding to siRNA9, siRNA14, siRNA35 in Table 8).

[0443] AB1080 (C6) immortalized FSHD patient-derived myotubes were treated with the siRNA conjugates at a concentration equivalent to 1 pM, 1 nM, or 100 nM of siRNA for 10 days. cDNA was obtained from cells with the TaqMan Fast Advanced Cells-to-Ct Kit (Thermo Fisher Scientific), and levels of three DUX4 transcriptome markers MBD3L2 (Hs00544743_m1), TRIM43 (Hs00299174_m1), ZSCAN4 (Hs00537549_m1), and RPL13A (Hs04194366_g1) were analyzed via qPCR with specific TaqMan assays (Thermo Fisher Scientific). Two-step amplification reactions and fluorescence measurements for determination of cycle threshold (Ct) were conducted on a QuantStudio 7 instrument (Thermo Fisher Scientific). FSHD composite scores in FSHD1 cells were calculated using the three DUX4 transcriptome markers (MBD3L2, TRIM43, and ZSCAN4) where ΔCt=(Average Ct of 3 DUX4 markers)−(Average Ct of RPL13A), ΔΔCt=ΔCt (Treated)−ΔCt (Vehicle), FSHD Composite=2−ΔΔCT*100(%) (see FIG. 7). Results show that the tested siRNA conjugates achieved reduction of the tested DUX4 transcriptome markers in FSHD patient-derived myotubes, and treatment with conjugate equivalent to 100 nM of siRNA achieved about 50% reduction of the tested DUX4 transcriptome markers.

siRNA and Antibody Conjugation Protocol for Example 6

[0444] The following protocol was used to make the siRNA conjugates tested in Example 6. Conjugates containing siRNA9, siRNA14, siRNA35 (corresponding to the siRNA9, siRNA14, and siRNA35 in Table 8) covalently linked to an anti-TfR Fab 3M12 VH4/Vκ3 were generated. The conjugates may be generated by a 1-step reaction or a 2-step reaction as shown below.

### Materials:

[0445] Azide-PEG3-vc-PABC-PFP linker: MW=773.79
[0446] Azido-PEG8-PFP ester linker: MW=633.6
[0447] BCN-PEG4-PFP linker: MW=607.6
[0448] Anti-TfR1 Fab 3M12 VH4/Vκ3: MW=47968
[0449] siRNA9, siRNA 14, and siRNA35 (corresponding to the siRNA9, siRNA14, and siRNA35 in Table 8)

### 2-Step Reaction:

[0450] Anti-TfR Fab 3M12 VH4/Vκ3 in PBS (5-6 mg/ml), 1×BCN (20 mg/ml in DMA, 32.9 mM), and 10% DMA were mixed and incubated at room temperature for at least 5 hours to generate the anti-TfR Fab 3M12 VH4/Vκ3-BCN intermediate. The antibody-BCN intermediate was then purified using NAP™ columns and eluted into PBS.

[0451] The sense strand of each tested siRNA was dissolved in water to a concentration of 50 mg/ml (concentration confirmed with UV absorbance). 4× azide-linker (20 mg/ml in DMA), 50× Tributylamine (4.2M), and 70% DMA were added into the sense strand solution and incubated at room temperature overnight to generate the azido-sense strand intermediate. After incubation, 1/10 volume of 3M NaCl and 3 volume of cold isopropanol alcohol (IPA) were added into the reaction mixtures. The reaction mixtures were placed in a −80° C. freezer for 30 minutes, followed by spinning at 4500 rpm for 25 minutes. Pellets containing the azido-sense strand intermediate were washed two times with 70% ethanol (pellets were lifted with pipette tips during washing), dissolved in PBS to a final concentration of about 40 mg/ml (concentration confirmed with UV absorbance).

[0452] To generate the azide-siRNA duplex intermediate, the antisense strand of each tested siRNA was dissolved in PBS to a concentration of 50 mg/ml (concentration confirmed with UV absorbance. The azide-sense strand intermediate and the corresponding antisense strand were mixed at a 1:1 ratio. For annealing, 300-500 ml of water were heated to boiling in a glass beaker and the tubes containing the azide-sense strand intermediate and antisense strand mixture were placed into the boiling water bath for 5 minutes, and left in the water bath as it cooled down on the bench to room temperature. The annealing efficiencies for each siRNA were measured with a UPLC SEC column.

[0453] Lastly, the anti-TfR Fab 3M12 VH4/Vκ3-BCN intermediate (at a concentration of 4-5 mg/ml in PBS as measured by UV-Vis) was mixed with 1.5× (targeting DAR1) of the azide-siRNA duplex intermediate, and incubated at room temperature overnight to generate the anti-TfR Fab-siRNA conjugates.

### 1-Step Reaction:

[0454] The Anti-TfR Fab 3M12 VH4/Vκ3 was buffer exchanged into 50 mM EPPS pH of 8.0 and concentrated to a concentration of about 10 mg/ml.

[0455] The sense strand of each tested siRNA was dissolved in water to a concentration of 50 mg/ml (concentration confirmed with UV absorbance). 4× azide-linker (20 mg/ml in DMA), 50× Tributylamine (4.2M), and 70% DMA were added into the sense strand solution and incubated at room temperature overnight to generate the azido-sense strand intermediate. After incubation, 1/10 volume of 3M NaCl and 3 volume of cold isopropanol alcohol (IPA) were added into the reaction mixtures. The reaction mixtures were placed in a −80° C. freezer for 30 minutes, followed by spinning at 4500 rpm for 25 minutes. Pellets containing the azido-sense strand intermediate were washed two times with 70% ethanol (pellets were lifted with pipette tips during washing), dissolved in PBS to a final concentration of about 40 mg/ml (concentration confirmed with UV absorbance).

[0456] To generate the azide-siRNA duplex intermediate, the antisense strand of each tested siRNA was dissolved in PBS to a concentration of 50 mg/ml (concentration confirmed with UV absorbance. The azide-sense strand intermediate and the corresponding antisense strand were mixed at a 1:1 ratio. For annealing, 300-500 ml of water were heated to boiling in a glass beaker and the tubes containing the azide-sense strand intermediate and antisense strand mixture were placed into the boiling water bath for 5 minutes, and left in the water bath as it cooled down on the bench to room temperature. The annealing efficiencies for each siRNA were measured with an UPLC SEC column.

[0457] To generate the BCN-azide-siRNA duplex intermediate, azide-siRNA duplex intermediate solution in 30 mM MES, pH 5.0 was slowly added into the same volume of DMA on ice. Then 4×BCN (20 mg/ml in DMA) was slowly added into the azide-siRNA duplex intermediate/DMA mixture and incubated at room temperature for 3-3.5 hours to generate the BCN-azide-siRNA duplex intermediate. A UPLC C18 column was used to check the completion of reaction.

[0458] To isolate the BCN-azide-siRNA duplex intermediate, 1/10 volume of 3M NaCl and 3 volume of cold IPA was added into the reaction mixture and placed in a −80° C. freezer for 30 minutes, followed by spinning at 4500 rpm for 25 minutes. The pellets containing the BCN-azide-siRNA duplex intermediate were washed two times with 70% ethanol (pellets were lifted with pipette tips during washing), dissolved in 20 mM MES, pH 5.0, to a concentration of about 20 mg/ml (concentration confirmed by UV absorbance).

[0459] Lastly, the anti-TfR Fab 3M12 VH4/Vκ3 was mixed with 1× (targeting DAR1) of the BCN-azide-siRNA duplex intermediate and incubated at room temperature overnight to generate the anti-TfR Fab-siRNA conjugates.

Purification by TSKgel superQ-5PW Column:

[0460] The anti-TfR Fab-siRNA conjugates generated using either the two-step reaction or the one-step reaction were purified using the methods below.

[0461] The crude conjugation reaction products in 50 mM EPPS, pH of 8.0 were diluted with 5 column volume (cv) of 10 mM Tris, pH of 8.0. The sample was loaded at 0.5 ml/minute onto a 1 ml TSKgel superQ-5PW column at less than 10 mg of conjugate per ml of resin. The column was washed with Buffer A (20 mM Tris, pH8.0) for 5-6 cv at 1 ml/minute. The conjugates were then eluted with 15-20 cv of an elution buffer containing 79% of Buffer A (20 mM Tris, pH8.0) and 21% Buffer B (20 mM Tris, pH8.0+1.5M NaCl) at 1 ml/minute. The eluted conjugates were then buffer exchanged into PBS and concentrated to a concentration of >5 mg/ml.

### Additional Embodiments

[0462] 1. A complex comprising a muscle-targeting agent covalently linked to a RNAi oligonucleotide targeting a double homeobox 4 (DUX4) mRNA, wherein the RNAi oligonucleotide comprises an antisense strand of 18-25 nucleotides in length and comprises a region of complementarity to a target sequence as set forth in SEQ ID NOs: 163-1574, and wherein the region of complementarity is at least 16 consecutive nucleosides in length.

[0463] 2. The complex of embodiment 1, wherein the muscle-targeting agent is an anti-transferrin receptor (TfR) antibody.

[0464] 3. The complex of embodiment 1 or embodiment 2, wherein the antisense strand comprises the nucleotide sequence of any one of SEQ ID NOs: 1575-2986 and 3027-3066.

[0465] 4. The complex of embodiment 1 or embodiment 2, wherein the antisense strand comprises the nucleotide sequence of any one of SEQ ID NOs: 3027-3066.

[0466] 5. The complex of any one of embodiments 1-4, wherein the RNAi oligonucleotide further comprises a sense strand which comprises at least 18 consecutive nucleosides complementary to the antisense strand.

[0467] 6. The complex of any one of embodiment 1-5, wherein the RNAi oligonucleotide comprises one or more modified nucleosides.

[0468] 7. The complex of embodiment 6, wherein the one or more modified nucleosides are 2′ modified nucleotides, optionally wherein the one or more 2′ modified nucleosides are selected from: 2′-fluoro (2′-F), 2′-O-methyl (2′-O-Me), 2′-O-methoxyethyl (2′-MOE), 2′-O-aminopropyl (2′-O-AP), 2′-O-dimethylaminoethyl (2′-O-DMAOE), 2′-O-dimethylaminopropyl (2′-O-DMAP), 2′-O-dimethylaminoethyloxyethyl (2′-O-DMAEOE), 2′-O—N-methylacetamido (2′-O-NMA)).

[0469] 8. The complex of embodiment 7, wherein each 2′ modified nucleotide is 2′-O-methyl or 2′-fluoro (2′-F).

[0470] 9. The complex of any one of embodiments 1-8, wherein the RNAi oligonucleotide comprises one or more phosphorothioate internucleoside linkages.

[0471] 10. The complex of embodiment 9, wherein the one or more phosphorothioate internucleoside linkage are present on the antisense strand of the RNAi oligonucleotide.

[0472] 11. The complex of embodiment 11, wherein the two internucleoside linkages at the 3′ end of the antisense strands are phosphorothioate internucleoside linkages.

[0473] 12. The complex of any one of embodiments 1-12, wherein the antisense strand is selected from the modified version of SEQ ID NOs: 3027-3066 listed in Table 8.

[0474] 13. The complex of any one of embodiments 5-12, wherein the sense strand is selected from the modified version of SEQ ID NOs: 2987-3026 listed in Table 8.

[0475] 14. The complex of embodiments 1-13, wherein the RNAi oligonucleotide is a siRNA molecule selected from the siRNAs listed in Table 8.

[0476] 15. The complex of any one of embodiments 2-14, wherein the anti-TfR antibody comprises a heavy chain complementarity determining region 1 (CDR-H1), a heavy chain complementarity determining region 2 (CDR-H2), a heavy chain complementarity determining region 3 (CDR-H3), a light chain complementarity determining region 1 (CDR-L1), a light chain complementarity determining region 2 (CDR-L2), a light chain complementarity determining region 3 (CDR-L3) of any of the anti-TfR antibodies listed in Table 2.

[0477] 16. The complex of any one of embodiments 2-14, wherein the anti-TfR antibody comprises a heavy chain variable region (VH) and a light chain variable region (VL) of any of the anti-TfR antibodies listed in Table 3.

[0478] 17. The complex of any one of embodiments 2-14, wherein the anti-TfR antibody is a Fab, optionally wherein the Fab comprises a heavy chain and a light chain of any of the anti-TfR Fabs listed in Table 5.

[0479] 18. The complex of any one of embodiments 1-17, wherein the muscle targeting agent and the antisense oligonucleotide are covalently linked via a linker, optionally wherein the linker comprises a valine-citrulline dipeptide.

[0480] 19. A method of reducing DUX4 expression in a muscle cell, the method comprising contacting the muscle cell with an effective amount of the complex of any one of embodiments 1-18 for promoting internalization of the RNAi oligonucleotide to the muscle cell.

[0481] 20. A method of treating Facioscapulohumeral muscular dystrophy (FSHD), the method comprising administering to a subject in need thereof an effective amount of the complex of any one of embodiments 1-18, wherein the subject has aberrant production of DUX4 protein.

[0482] 21. An siRNA oligonucleotide selected from:

Antisense strand:
(SEQ ID NO: 3031)
5′-fUfCmCfGmCfUmCfAmAfAmGfCmAfGmGfCmUfCmGfCmA*fG*mG-3′
Sense strand:
(SEQ ID NO: 2991)
5′-mUmGfCmGfAmGfCmCfUmGfCmUfUmUfGmAfGmCfGmGfA-3′;
Antisense strand:
(SEQ ID NO: 3034)
5′-fAfCmCfAmAfAmUfCmUfGmGfAmCfCmCfUmGfGmGfCmU*fC*mC-3′
Sense strand:
(SEQ ID NO: 2994)
5′-mAmGfCmCfCmAfGmGfGmUfCmCfAmGfAmUfUmUfGmGfU-3′;
Antisense strand:
(SEQ ID NO: 3032)
5′-fGfGmAfAmUfGmCfCmGfAmUfGmGfCmCfUmGfGmGfCmC*fA*mG-3′
Sense strand:
(SEQ ID NO: 2992)
5′-mGmGfCmCfCmAfGmGfCmCfAmUfCmGfGmCfAmUfUmCfC-3′;
Antisense strand:
(SEQ ID NO: 3033)
5′-fCfAmAfAmUfCmUfGmGfAmCfCmCfUmGfGmGfCmUfCmC*fG*mG-3′
Sense strand:
(SEQ ID NO: 2993)
5′-mGmGfAmGfCmCfCmAfGmGfGmUfCmCfAmGfAmUfUmUfG-3′;
Antisense strand:
(SEQ ID NO: 3042)
5′-fGfGmAfCmUfCmCfGmGfGmAfGmGfCmCfCmGfUmCfUmC*fU*mC-3′
Sense strand:
(SEQ ID NO: 3002)
5′-mGmAfGmAfCmGfGmGfCmCfUmCfCmCfGmGfAmGfUmCfC-3′;
Antisense strand:
(SEQ ID NO: 3041)
5′-fGfCmGfAmUfGmCfCmUfGmGfAmAfAmGfCmGfAmUfCmC*fU*mU-3′
Sense strand:
(SEQ ID NO: 3001)
5′-mGmGfAmUfCmGfCmUfUmUfCmCfAmGfGmCfAmUfCmGfC-3′;
Antisense strand:
(SEQ ID NO: 3030)
5′-fCfUmCfAmAfAmGfCmAfGmGfCmUfCmGfCmAfGmGfGmC*fC*mU-3′
Sense strand:
(SEQ ID NO: 2990)
5′-mGmCfCmCfUmGfCmGfAmGfCmCfUmGfCmUfUmUfGmAfG-3′;
Antisense strand:
(SEQ ID NO: 3036)
5′-fAfUmUfCmCfCmGfCmCfGmGfUmGfCmUfGmCfCmUfCmA*fG*mC-3′
Sense strand:
(SEQ ID NO: 2996)
5′-mUmGfAmGfGmCfAmGfCmAfCmCfGmGfCmGfGmGfAmAfU-3′;
Antisense strand:
(SEQ ID NO: 3035)
5′-fCfUmCfUmCfAmUfUmCfUmGfAmAfAmCfCmAfAmAfUmC*fU*mG-3′
Sense strand:
(SEQ ID NO: 2995)
5′-mGmAfUmUfUmGfGmUfUmUfCmAfGmAfAmUfGmAfGmAfG-3′;
Antisense strand:
(SEQ ID NO: 3065)
5′-fAfUmGfCmCfCmAfGmGfAmAfAmGfAmAfUmGfGmCfAmG*fU*mU-3′
Sense strand:
(SEQ ID NO: 3025)
5′-mCmUfGmCfCmAfUmUfCmUfUmUfCmCfUmGfGmGfCmAfU-3′;
Antisense strand:
(SEQ ID NO: 3054)
5′-fGfUmUfUmCfUmAfGmGfAmGfAmGfGmUfUmGfCmGfCmC*fU*mG-3′
Sense strand:
(SEQ ID NO: 3014)
5′-mGmGfCmGfCmAfAmCfCmUfCmUfCmCfUmAfGmAfAmAfC-3′;
Antisense strand:
(SEQ ID NO: 3057)
5′-fUfCmCfGmUfUmUfCmUfAmGfGmAfGmAfGmGfUmUfGmC*fG*mC-3′
Sense strand:
(SEQ ID NO: 3017)
5′-mGmCfAmAfCmCfUmCfUmCfCmUfAmGfAmAfAmCfGmGfA-3′;
Antisense strand:
(SEQ ID NO: 3027)
5′-fGfUmCfCmAfAmAfCmGfAmGfUmCfUmCfCmGfUmCfGmC*fC*mG-3′
Sense strand:
(SEQ ID NO: 2987)
5′-mGmCfGmAfCmGfGmAfGmAfCmUfCmGfUmUfUmGfGmAfC-3′;
Antisense strand:
(SEQ ID NO: 3049)
5′-fGfAmAfAmCfUmCfCmGfGmGfCmUfCmGfCmCfAmGfGmA*fG*mC-3′
Sense strand:
(SEQ ID NO: 3009)
5′-mUmCfCmUfGmGfCmGfAmGfCmCfCmGfGmAfGmUfUmUfC-3′;
Antisense strand:
(SEQ ID NO: 3064)
5′-fAfAmGfAmAfUmGfGmCfAmGfUmUfCmUfCmCfGmCfGmG*fU*mG-3′
Sense strand:
(SEQ ID NO: 3024)
5′-mCmCfGmCfGmGfAmGfAmAfCmUfGmCfCmAfUmUfCmUfU-3′;
Antisense strand:
(SEQ ID NO: 3055)
5′-fCfGmUfUmUfCmUfAmGfGmAfGmAfGmGfUmUfGmCfGmC*fC*mU-3′
Sense strand:
(SEQ ID NO: 3015)
5′-mGmCfGmCfAmAfCmCfUmCfUmCfCmUfAmGfAmAfAmCfG-3′;
Antisense strand:
(SEQ ID NO: 3028)
5′-fGfGmUfCmCfAmAfAmCfGmAfGmUfCmUfCmCfGmUfCmG*fC*mC-3′
Sense strand:
(SEQ ID NO: 2988)
5′-mCmGfAmCfGmGfAmGfAmCfUmCfGmUfUmUfGmGfAmCfC-3′;
Antisense strand:
(SEQ ID NO: 3063)
5′-fGfCmGfGmUfGmUfGmGfAmGfUmCfUmCfUmCfAmCfCmG*fG*mG-3′
Sense strand:
(SEQ ID NO: 3023)
5′-mCmGfGmUfGmAfGmAfGmAfCmUfCmCfAmCfAmCfCmGfC-3′;
Antisense strand:
(SEQ ID NO: 3052)
5′-fUfUmCfUmAfGmGfAmGfAmGfGmUfUmGfCmGfCmCfUmG*fC*mU-3′
Sense strand:
(SEQ ID NO: 3012)
5′-mCmAfGmGfCmGfCmAfAmCfCmUfCmUfCmCfUmAfGmAfA-3′;
Antisense strand:
(SEQ ID NO: 3059)
5′-fUfAmUfUmCfUmUfCmCfUmCfGmCfUmGfAmGfGmGfGmU*fG*mC-3′
Sense strand:
(SEQ ID NO: 3019)
5′-mAmCfCmCfCmUfCmAfGmCfGmAfGmGfAmAfGmAfAmUfA-3′;
Antisense strand:
(SEQ ID NO: 3029)
5′-fGfGmGfUmCfCmAfAmAfCmGfAmGfUmCfUmCfCmGfUmC*fG*mC-3′
Sense strand:
(SEQ ID NO: 2989)
5′-mGmAfCmGfGmAfGmAfCmUfCmGfUmUfUmGfGmAfCmCfC-3′;
Antisense strand:
(SEQ ID NO: 3044)
5′-fCfUmGfAmAfUmCfCmUfGmGfAmCfUmCfCmGfGmGfAmG*fG*mC-3′
Sense strand:
(SEQ ID NO: 3004)
5′-mCmUfCmCfCmGfGmAfGmUfCmCfAmGfGmAfUmUfCmAfG-3′;
Antisense strand:
(SEQ ID NO: 3053)
5′-fUfUmUfCmUfAmGfGmAfGmAfGmGfUmUfGmCfGmCfCmU*fG*mC-3′
Sense strand:
(SEQ ID NO: 3013)
5′-mAmGfGmCfGmCfAmAfCmCfUmCfUmCfCmUfAmGfAmAfA-3′;
Antisense strand:
(SEQ ID NO: 3050)
5′-fCfAmGfAmAfAmCfUmCfCmGfGmGfCmUfCmGfCmCfAmG*fG*mA-3′
Sense strand:
(SEQ ID NO: 3010)
5′-mCmUfGmGfCmGfAmGfCmCfCmGfGmAfGmUfUmUfCmUfG-3′;
Antisense strand:
(SEQ ID NO: 3038)
5′-fAfAmAfGmGfCmUfCmGfGmAfGmGfAmGfCmAfGmGfGmC*fG*mG-3′
Sense strand:
(SEQ ID NO: 2998)
5′-mGmCfCmCfUmGfCmUfCmCfUmCfCmGfAmGfCmCfUmUfU-3′;
Antisense strand:
(SEQ ID NO: 3047)
5′-fGfCmUfUmUfUmGfCmCfCmGfGmGfUmGfCmGfGmAfGmG*fC*mC-3′
Sense strand:
(SEQ ID NO: 3007)
5′-mCmCfUmCfCmGfCmAfCmCfCmGfGmGfCmAfAmAfAmGfC-3′;
Antisense strand:
(SEQ ID NO: 3045)
5′-fCfCmUfGmUfCmCfCmGfGmGfUmGfCmCfUmGfGmCfCmC*fU*mU-3′
Sense strand:
(SEQ ID NO: 3005)
5′-mGmGfGmCfCmAfGmGfCmAfCmCfCmGfGmGfAmCfAmGfG-3′;
Antisense strand:
(SEQ ID NO: 3043)
5′-fUfGmAfAmUfCmCfUmGfGmAfCmUfCmCfGmGfGmAfGmG*fC*mC-3′
Sense strand:
(SEQ ID NO: 3003)
5′-mCmCfUmCfCmCfGmGfAmGfUmCfCmAfGmGfAmUfUmCfA-3′;
Antisense strand:
(SEQ ID NO: 3066)
5′-fGfGmGfAmUfGmCfCmCfAmGfGmAfAmAfGmAfAmUfGmG*fC*mA-3′
Sense strand:
(SEQ ID NO: 3026)
5′-mCmCfAmUfUmCfUmUfUmCfCmUfGmGfGmCfAmUfCmCfC-3′;
Antisense strand:
(SEQ ID NO: 3062)
5′-fGfAmGfUmCfUmCfUmCfAmCfCmGfGmGfCmCfUmAfGmA*fC*mC-3′
Sense strand:
(SEQ ID NO: 3022)
5′-mUmCfUmAfGmGfCmCfCmGfGmUfGmAfGmAfGmAfCmUfC-3′;
Antisense strand:
(SEQ ID NO: 3056)
5′-fCfCmGfUmUfUmCfUmAfGmGfAmGfAmGfGmUfUmGfCmG*fC*mC-3′
Sense strand:
(SEQ ID NO: 3016)
5′-mCmGfCmAfAmCfCmUfCmUfCmCfUmAfGmAfAmAfCmGfG-3′;
Antisense strand:
(SEQ ID NO: 3048)
5′-fCfGmGfUmCfCmUfCmCfCmGfGmCfUmUfUmUfGmCfCmC*fG*mG-3′
Sense strand:
(SEQ ID NO: 3008)
5′-mGmGfGmCfAmAfAmAfGmCfCmGfGmGfAmGfGmAfCmCfG-3′;
Antisense strand:
(SEQ ID NO: 3061)
5′-fCfCmGfGmUfAmUfUmCfUmUfCmCfUmCfGmCfUmGfAmG*fG*mG-3′
Sense strand:
(SEQ ID NO: 3021)
5′-mCmUfCmAfGmCfGmAfGmGfAmAfGmAfAmUfAmCfCmGfG-3′;
Antisense strand:
(SEQ ID NO: 3046)
5′-fCfCmAfGmCfGmAfGmGfAmGfCmCfUmGfAmGfGmGfUmG*fG*mG-3′
Sense strand:
(SEQ ID NO: 3006)
5′-mCmAfCmCfCmUfCmAfGmGfCmUfCmCfUmCfGmCfUmGfG-3′;
Antisense strand:
(SEQ ID NO: 3058)
5′-fGfCmUfUmCfCmAfGmCfGmAfGmGfCmGfGmCfCmUfCmU*fU*mC-3′
Sense strand:
(SEQ ID NO: 3018)
5′-mAmGfAmGfGmCfCmGfCmCfUmCfGmCfUmGfGmAfAmGfC-3′;
Antisense strand:
(SEQ ID NO: 3040)
5′-fUfGmGfAmAfAmGfCmGfAmUfCmCfUmUfCmUfCmAfAmA*fG*mG-3′
Sense strand:
(SEQ ID NO: 3000)
5′-mUmUfUmGfAmGfAmAfGmGfAmUfCmGfCmUfUmUfCmCfA-3′;
Antisense strand:
(SEQ ID NO: 3039)
5′-fCfGmAfUmCfCmUfUmCfUmCfAmAfAmGfGmCfUmCfGmG*fA*mG-3′
Sense strand:
(SEQ ID NO: 2999)
5′-mCmCfGmAfGmCfCmUfUmUfGmAfGmAfAmGfGmAfUmCfG-3′;
Antisense strand:
(SEQ ID NO: 3037)
5′-fGfGmGfCmGfGmUfCmUfGmGfGmAfUmCfCmGfGmUfGmA*fC*mG-3′
Sense strand:
(SEQ ID NO: 2997)
5′-mUmCfAmCfCmGfGmAfUmCfCmCfAmGfAmCfCmGfCmCfC-3′;
Antisense strand:
(SEQ ID NO: 3060)
5′-fGfUmAfUmUfCmUfUmCfCmUfCmGfCmUfGmAfGmGfGmG*fU*mG-3′
Sense strand:
(SEQ ID NO: 3020)
5′-mCmCfCmCfUmCfAmGfCmGfAmGfGmAfAmGfAmAfUmAfC-3′
and
Antisense strand:
(SEQ ID NO: 3051)
5′-fUfGmCfUmGfCmAfGmAfAmAfCmUfCmCfGmGfGmCfUmC*fG*mC-3′
Sense strand:
(SEQ ID NO: 3011)
5′-mGmAfGmCfCmCfGmGfAmGfUmUfUmCfUmGfCmAfGmCfA-3′
wherein “m” is 2′-O-methyl (2′-O-Me);
“f” is 2′-fluoro (2′-F);
“*” indicates phosphorothioate internucleoside linkage;
and the absence of “*” between nucleosides indicate a
phosphodiester linkage.

### EQUIVALENTS AND TERMINOLOGY

[0483] The disclosure illustratively described herein suitably can be practiced in the absence of any element or elements, limitation or limitations that are not specifically disclosed herein. Thus, for example, in each instance herein any of the terms “comprising”, “consisting essentially of”, and “consisting of” may be replaced with either of the other two terms. The terms and expressions which have been employed are used as terms of description and not of limitation, and there is no intention that in the use of such terms and expressions of excluding any equivalents of the features shown and described or portions thereof, but it is recognized that various modifications are possible within the scope of the disclosure. Thus, it should be understood that although the present disclosure has been specifically disclosed by preferred embodiments, optional features, modification and variation of the concepts herein disclosed may be resorted to by those skilled in the art, and that such modifications and variations are considered to be within the scope of this disclosure.

[0484] In addition, where features or aspects of the disclosure are described in terms of Markush groups or other grouping of alternatives, those skilled in the art will recognize that the disclosure is also thereby described in terms of any individual member or subgroup of members of the Markush group or other group.

[0485] It should be appreciated that, in some embodiments, sequences presented in the sequence listing may be referred to in describing the structure of an oligonucleotide or other nucleic acid. In such embodiments, the actual oligonucleotide or other nucleic acid may have one or more alternative nucleotides (e.g., an RNA counterpart of a DNA nucleotide or a DNA counterpart of an RNA nucleotide) and/or (e.g., and) one or more modified nucleotides and/or (e.g., and) one or more modified internucleotide linkages and/or (e.g., and) one or more other modification compared with the specified sequence while retaining essentially same or similar complementary properties as the specified sequence.

[0486] The use of the terms “a” and “an” and “the” and similar referents in the context of describing the invention (especially in the context of the following claims) are to be construed to cover both the singular and the plural, unless otherwise indicated herein or clearly contradicted by context. The terms “comprising,” “having,” “including,” and “containing” are to be construed as open-ended terms (i.e., meaning “including, but not limited to,”) unless otherwise noted. Recitation of ranges of values herein are merely intended to serve as a shorthand method of referring individually to each separate value falling within the range, unless otherwise indicated herein, and each separate value is incorporated into the specification as if it were individually recited herein. All methods described herein can be performed in any suitable order unless otherwise indicated herein or otherwise clearly contradicted by context. The use of any and all examples, or exemplary language (e.g., “such as”) provided herein, is intended merely to better illuminate the invention and does not pose a limitation on the scope of the invention unless otherwise claimed. No language in the specification should be construed as indicating any non-claimed element as essential to the practice of the invention.

[0487] Embodiments of this invention are described herein. Variations of those embodiments may become apparent to those of ordinary skill in the art upon reading the foregoing description.

[0488] The inventors expect skilled artisans to employ such variations as appropriate, and the inventors intend for the invention to be practiced otherwise than as specifically described herein. Accordingly, this invention includes all modifications and equivalents of the subject matter recited in the claims appended hereto as permitted by applicable law. Moreover, any combination of the above-described elements in all possible variations thereof is encompassed by the invention unless otherwise indicated herein or otherwise clearly contradicted by context. Those skilled in the art will recognize, or be able to ascertain using no more than routine experimentation, many equivalents to the specific embodiments of the invention described herein. Such equivalents are intended to be encompassed by the following claims.

The application's sequence listing, which the Patent Office published only in electronic form, follows.

SEQUENCE LISTING (3077 sequences)

SEQ ID NO: 1 - protein, 8 aa, Artificial Sequence
  Synthetic
GFNIKDDY

SEQ ID NO: 2 - protein, 8 aa, Artificial Sequence
  Synthetic
IDPENGDT

SEQ ID NO: 3 - protein, 10 aa, Artificial Sequence
  Synthetic
TLWLRRGLDY

SEQ ID NO: 4 - protein, 11 aa, Artificial Sequence
  Synthetic
KSLLHSNGYTY

SEQ ID NO: 5 - protein, 3 aa, Artificial Sequence
  Synthetic
RMS

SEQ ID NO: 6 - protein, 9 aa, Artificial Sequence
  Synthetic
MQHLEYPFT

SEQ ID NO: 7 - protein, 5 aa, Artificial Sequence
  Synthetic
DDYMY

SEQ ID NO: 8 - protein, 17 aa, Artificial Sequence
  Synthetic
WIDPENGDTEYASKFQD

SEQ ID NO: 9 - protein, 8 aa, Artificial Sequence
  Synthetic
WLRRGLDY

SEQ ID NO: 10 - protein, 16 aa, Artificial Sequence
  Synthetic
RSSKSLLHSNGYTYLF

SEQ ID NO: 11 - protein, 7 aa, Artificial Sequence
  Synthetic
RMSNLAS

SEQ ID NO: 12 - protein, 7 aa, Artificial Sequence
  Synthetic
GFNIKDD

SEQ ID NO: 13 - protein, 3 aa, Artificial Sequence
  Synthetic
ENG

SEQ ID NO: 14 - protein, 6 aa, Artificial Sequence
  Synthetic
LRRGLD

SEQ ID NO: 15 - protein, 12 aa, Artificial Sequence
  Synthetic
SKSLLHSNGYTY

SEQ ID NO: 16 - protein, 6 aa, Artificial Sequence
  Synthetic
HLEYPF

SEQ ID NO: 17 - protein, 117 aa, Artificial Sequence
  Synthetic
EVQLQQSGAELVRPGASVKLSCTASGFNIKDDYMYWVKQRPEQGLEWIGWIDPENGDTEYASKFQDKATVTADTSSNTAYLQLSSLTSEDTAVYYCTLWLRRGLDYWGQGTSVTVSS

SEQ ID NO: 18 - protein, 112 aa, Artificial Sequence
  Synthetic
DIVMTQAAPSVPVTPGESVSISCRSSKSLLHSNGYTYLFWFLQRPGQSPQLLIYRMSNLASGVPDRFSGSGSGTAFTLRISRVEAEDVGVYYCMQHLEYPFTFGGGTKLEIK

SEQ ID NO: 19 - protein, 8 aa, Artificial Sequence
  Synthetic
IDPETGDT

SEQ ID NO: 20 - protein, 17 aa, Artificial Sequence
  Synthetic
WIDPETGDTEYASKFQD

SEQ ID NO: 21 - protein, 3 aa, Artificial Sequence
  Synthetic
ETG

SEQ ID NO: 22 - protein, 117 aa, Artificial Sequence
  Synthetic
EVQLQQSGAELVRPGASVKLSCTASGFNIKDDYMYWVKQRPEQGLEWIGWIDPETGDTEYASKFQDKATVTADTSSNTAYLQLSSLTSEDTAVYYCTLWLRRGLDYWGQGTSVTVSS

SEQ ID NO: 23 - protein, 8 aa, Artificial Sequence
  Synthetic
IDPESGDT

SEQ ID NO: 24 - protein, 17 aa, Artificial Sequence
  Synthetic
WIDPESGDTEYASKFQD

SEQ ID NO: 25 - protein, 3 aa, Artificial Sequence
  Synthetic
ESG

SEQ ID NO: 26 - protein, 117 aa, Artificial Sequence
  Synthetic
EVQLQQSGAELVRPGASVKLSCTASGFNIKDDYMYWVKQRPEQGLEWIGWIDPESGDTEYASKFQDKATVTADTSSNTAYLQLSSLTSEDTAVYYCTLWLRRGLDYWGQGTSVTVSS

SEQ ID NO: 27 - protein, 9 aa, Artificial Sequence
  Synthetic
GYSITSGYY

SEQ ID NO: 28 - protein, 7 aa, Artificial Sequence
  Synthetic
ITFDGAN

SEQ ID NO: 29 - protein, 12 aa, Artificial Sequence
  Synthetic
TRSSYDYDVLDY

SEQ ID NO: 30 - protein, 6 aa, Artificial Sequence
  Synthetic
QDISNF

SEQ ID NO: 31 - protein, 3 aa, Artificial Sequence
  Synthetic
YTS

SEQ ID NO: 32 - protein, 9 aa, Artificial Sequence
  Synthetic
QQGHTLPYT

SEQ ID NO: 33 - protein, 6 aa, Artificial Sequence
  Synthetic
SGYYWN

SEQ ID NO: 34 - protein, 16 aa, Artificial Sequence
  Synthetic
YITFDGANNYNPSLKN

SEQ ID NO: 35 - protein, 10 aa, Artificial Sequence
  Synthetic
SSYDYDVLDY

SEQ ID NO: 36 - protein, 11 aa, Artificial Sequence
  Synthetic
RASQDISNFLN

SEQ ID NO: 37 - protein, 7 aa, Artificial Sequence
  Synthetic
YTSRLHS

SEQ ID NO: 38 - protein, 8 aa, Artificial Sequence
  Synthetic
GYSITSGY

SEQ ID NO: 39 - protein, 3 aa, Artificial Sequence
  Synthetic
FDG

SEQ ID NO: 40 - protein, 8 aa, Artificial Sequence
  Synthetic
SYDYDVLD

SEQ ID NO: 41 - protein, 7 aa, Artificial Sequence
  Synthetic
SQDISNF

SEQ ID NO: 42 - protein, 6 aa, Artificial Sequence
  Synthetic
GHTLPY

SEQ ID NO: 43 - protein, 119 aa, Artificial Sequence
  Synthetic
DVQLQESGPGLVKPSQSLSLTCSVTGYSITSGYYWNWIRQFPGNKLEWMGYITFDGANNYNPSLKNRISITRDTSKNQFFLKLTSVTTEDTATYYCTRSSYDYDVLDYWGQGTTLTVSS

SEQ ID NO: 44 - protein, 107 aa, Artificial Sequence
  Synthetic
DIQMTQTTSSLSASLGDRVTISCRASQDISNFLNWYQQRPDGTVKLLIYYTSRLHSGVPSRFSGSGSGTDFSLTVSNLEQEDIATYFCQQGHTLPYTFGGGTKLEIK

SEQ ID NO: 45 - protein, 8 aa, Artificial Sequence
  Synthetic
GYSFTDYC

SEQ ID NO: 46 - protein, 8 aa, Artificial Sequence
  Synthetic
IYPGSGNT

SEQ ID NO: 47 - protein, 13 aa, Artificial Sequence
  Synthetic
AREDYYPYHGMDY

SEQ ID NO: 48 - protein, 10 aa, Artificial Sequence
  Synthetic
ESVDGYDNSF

SEQ ID NO: 49 - protein, 3 aa, Artificial Sequence
  Synthetic
RAS

SEQ ID NO: 50 - protein, 9 aa, Artificial Sequence
  Synthetic
QQSSEDPWT

SEQ ID NO: 51 - protein, 5 aa, Artificial Sequence
  Synthetic
DYCIN

SEQ ID NO: 52 - protein, 17 aa, Artificial Sequence
  Synthetic
WIYPGSGNTRYSERFKG

SEQ ID NO: 53 - protein, 11 aa, Artificial Sequence
  Synthetic
EDYYPYHGMDY

SEQ ID NO: 54 - protein, 15 aa, Artificial Sequence
  Synthetic
RASESVDGYDNSFMH

SEQ ID NO: 55 - protein, 7 aa, Artificial Sequence
  Synthetic
RASNLES

SEQ ID NO: 56 - protein, 7 aa, Artificial Sequence
  Synthetic
GYSFTDY

SEQ ID NO: 57 - protein, 3 aa, Artificial Sequence
  Synthetic
GSG

SEQ ID NO: 58 - protein, 9 aa, Artificial Sequence
  Synthetic
DYYPYHGMD

SEQ ID NO: 59 - protein, 11 aa, Artificial Sequence
  Synthetic
SESVDGYDNSF

SEQ ID NO: 60 - protein, 6 aa, Artificial Sequence
  Synthetic
SSEDPW

SEQ ID NO: 61 - protein, 120 aa, Artificial Sequence
  Synthetic
QIQLQQSGPELVRPGASVKISCKASGYSFTDYCINWVNQRPGQGLEWIGWIYPGSGNTRYSERFKGKATLTVDTSSNTAYMQLSSLTSEDSAVYFCAREDYYPYHGMDYWGQGTSVTVSS

SEQ ID NO: 62 - protein, 111 aa, Artificial Sequence
  Synthetic
DIVLTQSPTSLAVSLGQRATISCRASESVDGYDNSFMHWYQQKPGQPPKLLIFRASNLESGIPARFSGSGSRTDFTLTINPVEAADVATYYCQQSSEDPWTFGGGTKLEIK

SEQ ID NO: 63 - protein, 8 aa, Artificial Sequence
  Synthetic
GYSFTDYY

SEQ ID NO: 64 - protein, 5 aa, Artificial Sequence
  Synthetic
DYYIN

SEQ ID NO: 65 - protein, 120 aa, Artificial Sequence
  Synthetic
QIQLQQSGPELVRPGASVKISCKASGYSFTDYYINWVNQRPGQGLEWIGWIYPGSGNTRYSERFKGKATLTVDTSSNTAYMQLSSLTSEDSAVYFCAREDYYPYHGMDYWGQGTSVTVSS

SEQ ID NO: 66 - protein, 8 aa, Artificial Sequence
  Synthetic
GYSFTDYD

SEQ ID NO: 67 - protein, 5 aa, Artificial Sequence
  Synthetic
DYDIN

SEQ ID NO: 68 - protein, 120 aa, Artificial Sequence
  Synthetic
QIQLQQSGPELVRPGASVKISCKASGYSFTDYDINWVNQRPGQGLEWIGWIYPGSGNTRYSERFKGKATLTVDTSSNTAYMQLSSLTSEDSAVYFCAREDYYPYHGMDYWGQGTSVTVSS

SEQ ID NO: 69 - protein, 117 aa, Artificial Sequence
  Synthetic
EVQLVQSGSELKKPGASVKVSCTASGFNIKDDYMYWVRQPPGKGLEWIGWIDPETGDTEYASKFQDRVTVTADTSTNTAYMELSSLRSEDTAVYYCTLWLRRGLDYWGQGTLVTVSS

SEQ ID NO: 70 - protein, 112 aa, Artificial Sequence
  Synthetic
DIVMTQSPLSLPVTPGEPASISCRSSKSLLHSNGYTYLFWFQQRPGQSPRLLIYRMSNLASGVPDRFSGSGSGTDFTLKISRVEAEDVGVYYCMQHLEYPFTFGGGTKVEIK

SEQ ID NO: 71 - protein, 117 aa, Artificial Sequence
  Synthetic
EVQLVQSGSELKKPGASVKVSCTASGFNIKDDYMYWVRQPPGKGLEWIGWIDPESGDTEYASKFQDRVTVTADTSTNTAYMELSSLRSEDTAVYYCTLWLRRGLDYWGQGTLVTVSS

SEQ ID NO: 72 - protein, 117 aa, Artificial Sequence
  Synthetic
EVQLVQSGSELKKPGASVKVSCTASGFNIKDDYMYWVRQPPGKGLEWIGWIDPENGDTEYASKFQDRVTVTADTSTNTAYMELSSLRSEDTAVYYCTLWLRRGLDYWGQGTLVTVSS

SEQ ID NO: 73 - protein, 119 aa, Artificial Sequence
  Synthetic
QVQLQESGPGLVKPSQTLSLTCSVTGYSITSGYYWNWIRQPPGKGLEWMGYITFDGANNYNPSLKNRVSISRDTSKNQFSLKLSSVTAEDTATYYCTRSSYDYDVLDYWGQGTTVTVSS

SEQ ID NO: 74 - protein, 107 aa, Artificial Sequence
  Synthetic
DIQMTQSPSSLSASVGDRVTITCRASQDISNFLNWYQQKPGQPVKLLIYYTSRLHSGVPSRFSGSGSGTDFTLTISSLQPEDFATYFCQQGHTLPYTFGQGTKLEIK

SEQ ID NO: 75 - protein, 107 aa, Artificial Sequence
  Synthetic
DIQMTQSPSSLSASVGDRVTITCRASQDISNFLNWYQQKPGQPVKLLIYYTSRLHSGVPSRFSGSGSGTDFTLTISSLQPEDFATYYCQQGHTLPYTFGQGTKLEIK

SEQ ID NO: 76 - protein, 119 aa, Artificial Sequence
  Synthetic
QVQLQESGPGLVKPSQTLSLTCTVTGYSITSGYYWNWIRQPPGKGLEWIGYITFDGANNYNPSLKNRVSISRDTSKNQFSLKLSSVTAEDTATYYCTRSSYDYDVLDYWGQGTTVTVSS

SEQ ID NO: 77 - protein, 120 aa, Artificial Sequence
  Synthetic
QVQLVQSGAEVKKPGASVKVSCKASGYSFTDYYINWVRQAPGQGLEWMGWIYPGSGNTRYSERFKGRVTITRDTSASTAYMELSSLRSEDTAVYYCAREDYYPYHGMDYWGQGTLVTVSS

SEQ ID NO: 78 - protein, 111 aa, Artificial Sequence
  Synthetic
DIVLTQSPDSLAVSLGERATINCRASESVDGYDNSFMHWYQQKPGQPPKLLIFRASNLESGVPDRFSGSGSRTDFTLTISSLQAEDVAVYYCQQSSEDPWTFGQGTKLEIK

SEQ ID NO: 79 - protein, 120 aa, Artificial Sequence
  Synthetic
QVQLVQSGAEVKKPGASVKVSCKASGYSFTDYDINWVRQAPGQGLEWMGWIYPGSGNTRYSERFKGRVTITRDTSASTAYMELSSLRSEDTAVYYCAREDYYPYHGMDYWGQGTLVTVSS

SEQ ID NO: 80 - protein, 111 aa, Artificial Sequence
  Synthetic
DIVMTQSPDSLAVSLGERATINCRASESVDGYDNSFMHWYQQKPGQPPKLLIFRASNLESGVPDRFSGSGSGTDFTLTISSLQAEDVAVYYCQQSSEDPWTFGQGTKLEIK

SEQ ID NO: 81 - protein, 330 aa, Homo Sapiens [sequence omitted]

SEQ ID NO: 82 - protein, 330 aa, Artificial Sequence
  Synthetic
ASTKGPSVFPLAPSSKSTSGGTAALGCLVKDYFPEPVTVSWNSGALTSGVHTFPAVLQSSGLYSLSSVVTVPSSSLGTQTYICNVNHKPSNTKVDKKVEPKSCDKTHTCPPCPAPEAAGGPSVFLFPPKPKDTLMISRTPEVTCVVVDVSHEDPEVKFNWYVDGVEVHNAKTKPREEQYNSTYRVVSVLTVLHQDWLNGKEYKCKVSNKALPAPIEKTISKAKGQPREPQVYTLPPSRDELTKNQVSLTCLVKGFYPSDIAVEWESNGQPENNYKTTPPVLDSDGSFFLYSKLTVDKSRWQQGNVFSCSVMHEALHNHYTQKSLSLSPGK

SEQ ID NO: 83 - protein, 107 aa, Artificial Sequence [sequence omitted]

SEQ ID NO: 84 - protein, 447 aa, Artificial Sequence
  Synthetic
EVQLVQSGSELKKPGASVKVSCTASGFNIKDDYMYWVRQPPGKGLEWIGWIDPETGDTEYASKFQDRVTVTADTSTNTAYMELSSLRSEDTAVYYCTLWLRRGLDYWGQGTLVTVSSASTKGPSVFPLAPSSKSTSGGTAALGCLVKDYFPEPVTVSWNSGALTSGVHTFPAVLQSSGLYSLSSVVTVPSSSLGTQTYICNVNHKPSNTKVDKKVEPKSCDKTHTCPPCPAPELLGGPSVFLFPPKPKDTLMISRTPEVTCVVVDVSHEDPEVKFNWYVDGVEVHNAKTKPREEQYNSTYRVVSVLTVLHQDWLNGKEYKCKVSNKALPAPIEKTISKAKGQPREPQVYTLPPSRDELTKNQVSLTCLVKGFYPSDIAVEWESNGQPENNYKTTPPVLDSDGSFFLYSKLTVDKSRWQQGNVFSCSVMHEALHNHYTQKSLSLSPGK

SEQ ID NO: 85 - protein, 219 aa, Artificial Sequence
  Synthetic
DIVMTQSPLSLPVTPGEPASISCRSSKSLLHSNGYTYLFWFQQRPGQSPRLLIYRMSNLASGVPDRFSGSGSGTDFTLKISRVEAEDVGVYYCMQHLEYPFTFGGGTKVEIKRTVAAPSVFIFPPSDEQLKSGTASVVCLLNNFYPREAKVQWKVDNALQSGNSQESVTEQDSKDSTYSLSSTLTLSKADYEKHKVYACEVTHQGLSSPVTKSFNRGEC

SEQ ID NO: 86 - protein, 447 aa, Artificial Sequence
  Synthetic
EVQLVQSGSELKKPGASVKVSCTASGFNIKDDYMYWVRQPPGKGLEWIGWIDPESGDTEYASKFQDRVTVTADTSTNTAYMELSSLRSEDTAVYYCTLWLRRGLDYWGQGTLVTVSSASTKGPSVFPLAPSSKSTSGGTAALGCLVKDYFPEPVTVSWNSGALTSGVHTFPAVLQSSGLYSLSSVVTVPSSSLGTQTYICNVNHKPSNTKVDKKVEPKSCDKTHTCPPCPAPELLGGPSVFLFPPKPKDTLMISRTPEVTCVVVDVSHEDPEVKFNWYVDGVEVHNAKTKPREEQYNSTYRVVSVLTVLHQDWLNGKEYKCKVSNKALPAPIEKTISKAKGQPREPQVYTLPPSRDELTKNQVSLTCLVKGFYPSDIAVEWESNGQPENNYKTTPPVLDSDGSFFLYSKLTVDKSRWQQGNVFSCSVMHEALHNHYTQKSLSLSPGK

SEQ ID NO: 87 - protein, 447 aa, Artificial Sequence
  Synthetic
EVQLVQSGSELKKPGASVKVSCTASGFNIKDDYMYWVRQPPGKGLEWIGWIDPENGDTEYASKFQDRVTVTADTSTNTAYMELSSLRSEDTAVYYCTLWLRRGLDYWGQGTLVTVSSASTKGPSVFPLAPSSKSTSGGTAALGCLVKDYFPEPVTVSWNSGALTSGVHTFPAVLQSSGLYSLSSVVTVPSSSLGTQTYICNVNHKPSNTKVDKKVEPKSCDKTHTCPPCPAPELLGGPSVFLFPPKPKDTLMISRTPEVTCVVVDVSHEDPEVKFNWYVDGVEVHNAKTKPREEQYNSTYRVVSVLTVLHQDWLNGKEYKCKVSNKALPAPIEKTISKAKGQPREPQVYTLPPSRDELTKNQVSLTCLVKGFYPSDIAVEWESNGQPENNYKTTPPVLDSDGSFFLYSKLTVDKSRWQQGNVFSCSVMHEALHNHYTQKSLSLSPGK

SEQ ID NO: 88 - protein, 449 aa, Artificial Sequence
  Synthetic
QVQLQESGPGLVKPSQTLSLTCSVTGYSITSGYYWNWIRQPPGKGLEWMGYITFDGANNYNPSLKNRVSISRDTSKNQFSLKLSSVTAEDTATYYCTRSSYDYDVLDYWGQGTTVTVSSASTKGPSVFPLAPSSKSTSGGTAALGCLVKDYFPEPVTVSWNSGALTSGVHTFPAVLQSSGLYSLSSVVTVPSSSLGTQTYICNVNHKPSNTKVDKKVEPKSCDKTHTCPPCPAPELLGGPSVFLFPPKPKDTLMISRTPEVTCVVVDVSHEDPEVKFNWYVDGVEVHNAKTKPREEQYNSTYRVVSVLTVLHQDWLNGKEYKCKVSNKALPAPIEKTISKAKGQPREPQVYTLPPSRDELTKNQVSLTCLVKGFYPSDIAVEWESNGQPENNYKTTPPVLDSDGSFFLYSKLTVDKSRWQQGNVFSCSVMHEALHNHYTQKSLSLSPGK

SEQ ID NO: 89 - protein, 214 aa, Artificial Sequence
  Synthetic
DIQMTQSPSSLSASVGDRVTITCRASQDISNFLNWYQQKPGQPVKLLIYYTSRLHSGVPSRFSGSGSGTDFTLTISSLQPEDFATYFCQQGHTLPYTFGQGTKLEIKRTVAAPSVFIFPPSDEQLKSGTASVVCLLNNFYPREAKVQWKVDNALQSGNSQESVTEQDSKDSTYSLSSTLTLSKADYEKHKVYACEVTHQGLSSPVTKSFNRGEC

SEQ ID NO: 90 - protein, 214 aa, Artificial Sequence
  Synthetic
DIQMTQSPSSLSASVGDRVTITCRASQDISNFLNWYQQKPGQPVKLLIYYTSRLHSGVPSRFSGSGSGTDFTLTISSLQPEDFATYYCQQGHTLPYTFGQGTKLEIKRTVAAPSVFIFPPSDEQLKSGTASVVCLLNNFYPREAKVQWKVDNALQSGNSQESVTEQDSKDSTYSLSSTLTLSKADYEKHKVYACEVTHQGLSSPVTKSFNRGEC

SEQ ID NO: 91 - protein, 449 aa, Artificial Sequence
  Synthetic
QVQLQESGPGLVKPSQTLSLTCTVTGYSITSGYYWNWIRQPPGKGLEWIGYITFDGANNYNPSLKNRVSISRDTSKNQFSLKLSSVTAEDTATYYCTRSSYDYDVLDYWGQGTTVTVSSASTKGPSVFPLAPSSKSTSGGTAALGCLVKDYFPEPVTVSWNSGALTSGVHTFPAVLQSSGLYSLSSVVTVPSSSLGTQTYICNVNHKPSNTKVDKKVEPKSCDKTHTCPPCPAPELLGGPSVFLFPPKPKDTLMISRTPEVTCVVVDVSHEDPEVKFNWYVDGVEVHNAKTKPREEQYNSTYRVVSVLTVLHQDWLNGKEYKCKVSNKALPAPIEKTISKAKGQPREPQVYTLPPSRDELTKNQVSLTCLVKGFYPSDIAVEWESNGQPENNYKTTPPVLDSDGSFFLYSKLTVDKSRWQQGNVFSCSVMHEALHNHYTQKSLSLSPGK

SEQ ID NO: 92 - protein, 450 aa, Artificial Sequence
  Synthetic
QVQLVQSGAEVKKPGASVKVSCKASGYSFTDYYINWVRQAPGQGLEWMGWIYPGSGNTRYSERFKGRVTITRDTSASTAYMELSSLRSEDTAVYYCAREDYYPYHGMDYWGQGTLVTVSSASTKGPSVFPLAPSSKSTSGGTAALGCLVKDYFPEPVTVSWNSGALTSGVHTFPAVLQSSGLYSLSSVVTVPSSSLGTQTYICNVNHKPSNTKVDKKVEPKSCDKTHTCPPCPAPELLGGPSVFLFPPKPKDTLMISRTPEVTCVVVDVSHEDPEVKFNWYVDGVEVHNAKTKPREEQYNSTYRVVSVLTVLHQDWLNGKEYKCKVSNKALPAPIEKTISKAKGQPREPQVYTLPPSRDELTKNQVSLTCLVKGFYPSDIAVEWESNGQPENNYKTTPPVLDSDGSFFLYSKLTVDKSRWQQGNVFSCSVMHEALHNHYTQKSLSLSPGK

SEQ ID NO: 93 - protein, 218 aa, Artificial Sequence
  Synthetic
DIVLTQSPDSLAVSLGERATINCRASESVDGYDNSFMHWYQQKPGQPPKLLIFRASNLESGVPDRFSGSGSRTDFTLTISSLQAEDVAVYYCQQSSEDPWTFGQGTKLEIKRTVAAPSVFIFPPSDEQLKSGTASVVCLLNNFYPREAKVQWKVDNALQSGNSQESVTEQDSKDSTYSLSSTLTLSKADYEKHKVYACEVTHQGLSSPVTKSFNRGEC

SEQ ID NO: 94 - protein, 450 aa, Artificial Sequence
  Synthetic
QVQLVQSGAEVKKPGASVKVSCKASGYSFTDYDINWVRQAPGQGLEWMGWIYPGSGNTRYSERFKGRVTITRDTSASTAYMELSSLRSEDTAVYYCAREDYYPYHGMDYWGQGTLVTVSSASTKGPSVFPLAPSSKSTSGGTAALGCLVKDYFPEPVTVSWNSGALTSGVHTFPAVLQSSGLYSLSSVVTVPSSSLGTQTYICNVNHKPSNTKVDKKVEPKSCDKTHTCPPCPAPELLGGPSVFLFPPKPKDTLMISRTPEVTCVVVDVSHEDPEVKFNWYVDGVEVHNAKTKPREEQYNSTYRVVSVLTVLHQDWLNGKEYKCKVSNKALPAPIEKTISKAKGQPREPQVYTLPPSRDELTKNQVSLTCLVKGFYPSDIAVEWESNGQPENNYKTTPPVLDSDGSFFLYSKLTVDKSRWQQGNVFSCSVMHEALHNHYTQKSLSLSPGK

SEQ ID NO: 95 - protein, 218 aa, Artificial Sequence
  Synthetic
DIVMTQSPDSLAVSLGERATINCRASESVDGYDNSFMHWYQQKPGQPPKLLIFRASNLESGVPDRFSGSGSGTDFTLTISSLQAEDVAVYYCQQSSEDPWTFGQGTKLEIKRTVAAPSVFIFPPSDEQLKSGTASVVCLLNNFYPREAKVQWKVDNALQSGNSQESVTEQDSKDSTYSLSSTLTLSKADYEKHKVYACEVTHQGLSSPVTKSFNRGEC

SEQ ID NO: 96 - protein, 108 aa, Artificial Sequence
  Synthetic
ASTKGPSVFPLAPSSKSTSGGTAALGCLVKDYFPEPVTVSWNSGALTSGVHTFPAVLQSSGLYSLSSVVTVPSSSLGTQTYICNVNHKPSNTKVDKKVEPKSCDKTHT

SEQ ID NO: 97 - protein, 225 aa, Artificial Sequence
  Synthetic
EVQLVQSGSELKKPGASVKVSCTASGFNIKDDYMYWVRQPPGKGLEWIGWIDPETGDTEYASKFQDRVTVTADTSTNTAYMELSSLRSEDTAVYYCTLWLRRGLDYWGQGTLVTVSSASTKGPSVFPLAPSSKSTSGGTAALGCLVKDYFPEPVTVSWNSGALTSGVHTFPAVLQSSGLYSLSSVVTVPSSSLGTQTYICNVNHKPSNTKVDKKVEPKSCDKTHT

SEQ ID NO: 98 - protein, 225 aa, Artificial Sequence
  Synthetic
EVQLVQSGSELKKPGASVKVSCTASGFNIKDDYMYWVRQPPGKGLEWIGWIDPESGDTEYASKFQDRVTVTADTSTNTAYMELSSLRSEDTAVYYCTLWLRRGLDYWGQGTLVTVSSASTKGPSVFPLAPSSKSTSGGTAALGCLVKDYFPEPVTVSWNSGALTSGVHTFPAVLQSSGLYSLSSVVTVPSSSLGTQTYICNVNHKPSNTKVDKKVEPKSCDKTHT

SEQ ID NO: 99 - protein, 225 aa, Artificial Sequence
  Synthetic
EVQLVQSGSELKKPGASVKVSCTASGFNIKDDYMYWVRQPPGKGLEWIGWIDPENGDTEYASKFQDRVTVTADTSTNTAYMELSSLRSEDTAVYYCTLWLRRGLDYWGQGTLVTVSSASTKGPSVFPLAPSSKSTSGGTAALGCLVKDYFPEPVTVSWNSGALTSGVHTFPAVLQSSGLYSLSSVVTVPSSSLGTQTYICNVNHKPSNTKVDKKVEPKSCDKTHT

SEQ ID NO: 100 - protein, 227 aa, Artificial Sequence
  Synthetic
QVQLQESGPGLVKPSQTLSLTCSVTGYSITSGYYWNWIRQPPGKGLEWMGYITFDGANNYNPSLKNRVSISRDTSKNQFSLKLSSVTAEDTATYYCTRSSYDYDVLDYWGQGTTVTVSSASTKGPSVFPLAPSSKSTSGGTAALGCLVKDYFPEPVTVSWNSGALTSGVHTFPAVLQSSGLYSLSSVVTVPSSSLGTQTYICNVNHKPSNTKVDKKVEPKSCDKTHT

SEQ ID NO: 101 - protein, 227 aa, Artificial Sequence
  Synthetic
QVQLQESGPGLVKPSQTLSLTCTVTGYSITSGYYWNWIRQPPGKGLEWIGYITFDGANNYNPSLKNRVSISRDTSKNQFSLKLSSVTAEDTATYYCTRSSYDYDVLDYWGQGTTVTVSSASTKGPSVFPLAPSSKSTSGGTAALGCLVKDYFPEPVTVSWNSGALTSGVHTFPAVLQSSGLYSLSSVVTVPSSSLGTQTYICNVNHKPSNTKVDKKVEPKSCDKTHT

SEQ ID NO: 102 - protein, 228 aa, Artificial Sequence
  Synthetic
QVQLVQSGAEVKKPGASVKVSCKASGYSFTDYYINWVRQAPGQGLEWMGWIYPGSGNTRYSERFKGRVTITRDTSASTAYMELSSLRSEDTAVYYCAREDYYPYHGMDYWGQGTLVTVSSASTKGPSVFPLAPSSKSTSGGTAALGCLVKDYFPEPVTVSWNSGALTSGVHTFPAVLQSSGLYSLSSVVTVPSSSLGTQTYICNVNHKPSNTKVDKKVEPKSCDKTHT

SEQ ID NO: 103 - protein, 228 aa, Artificial Sequence
  Synthetic
QVQLVQSGAEVKKPGASVKVSCKASGYSFTDYDINWVRQAPGQGLEWMGWIYPGSGNTRYSERFKGRVTITRDTSASTAYMELSSLRSEDTAVYYCAREDYYPYHGMDYWGQGTLVTVSSASTKGPSVFPLAPSSKSTSGGTAALGCLVKDYFPEPVTVSWNSGALTSGVHTFPAVLQSSGLYSLSSVVTVPSSSLGTQTYICNVNHKPSNTKVDKKVEPKSCDKTHT

SEQ ID NO: 104 - protein, 19 aa, Artificial Sequence
  Synthetic
MGWSCIILFLVATATGVHS

SEQ ID NO: 105 - protein, 760 aa, Homo Sapiens
MMDQARSAFSNLFGGEPLSYTRFSLARQVDGDNSHVEMKLAVDEEENADNNTKANVTKPKRCSGSICYGTIAVIVFFLIGFMIGYLGYCKGVEPKTECERLAGTESPVREEPGEDFPAARRLYWDDLKRKLSEKLDSTDFTGTIKLLNENSYVPREAGSQKDENLALYVENQFREFKLSKVWRDQHFVKIQVKDSAQNSVIIVDKNGRLVYLVENPGGYVAYSKAATVTGKLVHANFGTKKDFEDLYTPVNGSIVIVRAGKITFAEKVANAESLNAIGVLIYMDQTKFPIVNAELSFFGHAHLGTGDPYTPGFPSFNHTQFPPSRSSGLPNIPVQTISRAAAEKLFGNMEGDCPSDWKTDSTCRMVTSESKNVKLTVSNVLKEIKILNIFGVIKGFVEPDHYVVVGAQRDAWGPGAAKSGVGTALLLKLAQMFSDMVLKDGFQPSRSIIFASWSAGDFGSVGATEWLEGYLSSLHLKAFTYINLDKAVLGTSNFKVSASPLLYTLIEKTMQNVKHPVTGQFLYQDSNWASKVEKLTLDNAAFPFLAYSGIPAVSFCFCEDTDYPYLGTTMDTYKELIERIPELNKVARAAAEVAGQFVIKLTHDVELNLDYERYNSQLLSFVRDLNQYRADIKEMGLSLQWLYSARGDFFRATSRLTTDFGNAEKTDRFVMKKLNDRVMRVEYHFLSPYVSPKESPFRHVFWGSGSHTLPALLENLKLRKQNNGAFNETLFRNQLALATWTIQGAANALSGDVWDIDNEF

SEQ ID NO: 106 - protein, 760 aa, Macaca mulatta
MMDQARSAFSNLFGGEPLSYTRFSLARQVDGDNSHVEMKLGVDEEENTDNNTKPNGTKPKRCGGNICYGTIAVIIFFLIGFMIGYLGYCKGVEPKTECERLAGTESPAREEPEEDFPAAPRLYWDDLKRKLSEKLDTTDFTSTIKLLNENLYVPREAGSQKDENLALYIENQFREFKLSKVWRDQHFVKIQVKDSAQNSVIIVDKNGGLVYLVENPGGYVAYSKAATVTGKLVHANFGTKKDFEDLDSPVNGSIVIVRAGKITFAEKVANAESLNAIGVLIYMDQTKFPIVKADLSFFGHAHLGTGDPYTPGFPSFNHTQFPPSQSSGLPNIPVQTISRAAAEKLFGNMEGDCPSDWKTDSTCKMVTSENKSVKLTVSNVLKETKILNIFGVIKGFVEPDHYVVVGAQRDAWGPGAAKSSVGTALLLKLAQMFSDMVLKDGFQPSRSIIFASWSAGDFGSVGATEWLEGYLSSLHLKAFTYINLDKAVLGTSNFKVSASPLLYTLIEKTMQDVKHPVTGRSLYQDSNWASKVEKLTLDNAAFPFLAYSGIPAVSFCFCEDTDYPYLGTTMDTYKELVERIPELNKVARAAAEVAGQFVIKLTHDTELNLDYERYNSQLLLFLRDLNQYRADVKEMGLSLQWLYSARGDFFRATSRLTTDFRNAEKRDKFVMKKLNDRVMRVEYYFLSPYVSPKESPFRHVFWGSGSHTLSALLESLKLRRQNNSAFNETLFRNQLALATWTIQGAANALSGDVWDIDNEF

SEQ ID NO: 107 - protein, 760 aa, Macaca fascicularis
MMDQARSAFSNLFGGEPLSYTRFSLARQVDGDNSHVEMKLGVDEEENTDNNTKANGTKPKRCGGNICYGTIAVIIFFLIGFMIGYLGYCKGVEPKTECERLAGTESPAREEPEEDFPAAPRLYWDDLKRKLSEKLDTTDFTSTIKLLNENLYVPREAGSQKDENLALYIENQFREFKLSKVWRDQHFVKIQVKDSAQNSVIIVDKNGGLVYLVENPGGYVAYSKAATVTGKLVHANFGTKKDFEDLDSPVNGSIVIVRAGKITFAEKVANAESLNAIGVLIYMDQTKFPIVKADLSFFGHAHLGTGDPYTPGFPSFNHTQFPPSQSSGLPNIPVQTISRAAAEKLFGNMEGDCPSDWKTDSTCKMVTSENKSVKLTVSNVLKETKILNIFGVIKGFVEPDHYVVVGAQRDAWGPGAAKSSVGTALLLKLAQMFSDMVLKDGFQPSRSIIFASWSAGDFGSVGATEWLEGYLSSLHLKAFTYINLDKAVLGTSNFKVSASPLLYTLIEKTMQDVKHPVTGRSLYQDSNWASKVEKLTLDNAAFPFLAYSGIPAVSFCFCEDTDYPYLGTTMDTYKELVERIPELNKVARAAAEVAGQFVIKLTHDTELNLDYERYNSQLLLFLRDLNQYRADVKEMGLSLQWLYSARGDFFRATSRLTTDFRNAEKRDKFVMKKLNDRVMRVEYYFLSPYVSPKESPFRHVFWGSGSHTLSALLESLKLRRQNNSAFNETLFRNQLALATWTIQGAANALSGDVWDIDNEF

SEQ ID NO: 108 - protein, 763 aa, Mus musculus
MMDQARSAFSNLFGGEPLSYTRFSLARQVDGDNSHVEMKLAADEEENADNNMKASVRKPKRFNGRLCFAAIALVIFFLIGFMSGYLGYCKRVEQKEECVKLAETEETDKSETMETEDVPTSSRLYWADLKTLLSEKLNSIEFADTIKQLSQNTYTPREAGSQKDESLAYYIENQFHEFKFSKVWRDEHYVKIQVKSSIGQNMVTIVQSNGNLDPVESPEGYVAFSKPTEVSGKLVHANFGTKKDFEELSYSVNGSLVIVRAGEITFAEKVANAQSFNAIGVLIYMDKNKFPVVEADLALFGHAHLGTGDPYTPGFPSFNHTQFPPSQSSGLPNIPVQTISRAAAEKLFGKMEGSCPARWNIDSSCKLELSQNQNVKLIVKNVLKERRILNIFGVIKGYEEPDRYVVVGAQRDALGAGVAAKSSVGTGLLLKLAQVFSDMISKDGFRPSRSIIFASWTAGDFGAVGATEWLEGYLSSLHLKAFTYINLDKVVLGTSNFKVSASPLLYTLMGKIMQDVKHPVDGKSLYRDSNWISKVEKLSFDNAAYPFLAYSGIPAVSFCFCEDADYPYLGTRLDTYEALTQKVPQLNQMVRTAAEVAGQLIIKLTHDVELNLDYEMYNSKLLSFMKDLNQFKTDIRDMGLSLQWLYSARGDYFRATSRLTTDFHNAEKTNRFVMREINDRIMKVEYHFLSPYVSPRESPFRHIFWGSGSHTLSALVENLKLRQKNITAFNETLFRNQLALATWTIQGVANALSGDIWNIDNEF

SEQ ID NO: 109 - protein, 197 aa, Artificial Sequence
  Synthetic
FVKIQVKDSAQNSVIIVDKNGRLVYLVENPGGYVAYSKAATVTGKLVHANFGTKKDFEDLYTPVNGSIVIVRAGKITFAEKVANAESLNAIGVLIYMDQTKFPIVNAELSFFGHAHLGTGDPYTPGFPSFNHTQFPPSRSSGLPNIPVQTISRAAAEKLFGNMEGDCPSDWKTDSTCRMVTSESKNVKLTVSNVLKE

SEQ ID NO: 110 - protein, 5 aa, Artificial Sequence
  Synthetic
SYWMH

SEQ ID NO: 111 - protein, 17 aa, Artificial Sequence
  Synthetic
EINPTNGRTNYIEKFKS

SEQ ID NO: 112 - protein, 7 aa, Artificial Sequence
  Synthetic
GTRAYHY

SEQ ID NO: 113 - protein, 11 aa, Artificial Sequence
  Synthetic
RASDNLYSNLA

SEQ ID NO: 114 - protein, 7 aa, Artificial Sequence
  Synthetic
DATNLAD

SEQ ID NO: 115 - protein, 9 aa, Artificial Sequence
  Synthetic
QHFWGTPLT

SEQ ID NO: 116 - protein, 7 aa, Artificial Sequence
  Synthetic
GYTFTSY

SEQ ID NO: 117 - protein, 6 aa, Artificial Sequence
  Synthetic
NPTNGR

SEQ ID NO: 118 - protein, 6 aa, Artificial Sequence
  Synthetic
TSYWMH

SEQ ID NO: 119 - protein, 13 aa, Artificial Sequence
  Synthetic
WIGEINPTNGRTN

SEQ ID NO: 120 - protein, 6 aa, Artificial Sequence
  Synthetic
ARGTRA

SEQ ID NO: 121 - protein, 7 aa, Artificial Sequence
  Synthetic
YSNLAWY

SEQ ID NO: 122 - protein, 10 aa, Artificial Sequence
  Synthetic
LLVYDATNLA

SEQ ID NO: 123 - protein, 8 aa, Artificial Sequence
  Synthetic
QHFWGTPL

SEQ ID NO: 124 - protein, 116 aa, Artificial Sequence
  Synthetic
QVQLQQPGAELVKPGASVKLSCKASGYTFTSYWMHWVKQRPGQGLEWIGEINPTNGRTNYIEKFKSKATLTVDKSSSTAYMQLSSLTSEDSAVYYCARGTRAYHYWGQGTSVTVSS

SEQ ID NO: 125 - protein, 107 aa, Artificial Sequence
  Synthetic
DIQMTQSPASLSVSVGETVTITCRASDNLYSNLAWYQQKQGKSPQLLVYDATNLADGVPSRFSGSGSGTQYSLKINSLQSEDFGTYYCQHFWGTPLTFGAGTKLELK

SEQ ID NO: 126 - protein, 9 aa, Artificial Sequence
  Synthetic
QHFAGTPLT

SEQ ID NO: 127 - protein, 8 aa, Artificial Sequence
  Synthetic
QHFAGTPL

SEQ ID NO: 128 - protein, 116 aa, Artificial Sequence
  Synthetic
EVQLVQSGAEVKKPGASVKVSCKASGYTFTSYWMHWVRQAPGQRLEWIGEINPTNGRTNYIEKFKSRATLTVDKSASTAYMELSSLRSEDTAVYYCARGTRAYHYWGQGTMVTVSS

SEQ ID NO: 129 - protein, 107 aa, Artificial Sequence
  Synthetic
DIQMTQSPSSLSASVGDRVTITCRASDNLYSNLAWYQQKPGKSPKLLVYDATNLADGVPSRFSGSGSGTDYTLTISSLQPEDFATYYCQHFWGTPLTFGQGTKVEIK

SEQ ID NO: 130 - protein, 9 aa, Artificial Sequence
  Synthetic
CPKTRRVPC

SEQ ID NO: 131 - protein, 7 aa, Artificial Sequence
  Synthetic
DDTRHWG

SEQ ID NO: 132 - protein, 446 aa, Artificial Sequence
  Synthetic
QVQLQQPGAELVKPGASVKLSCKASGYTFTSYWMHWVKQRPGQGLEWIGEINPTNGRTNYIEKFKSKATLTVDKSSSTAYMQLSSLTSEDSAVYYCARGTRAYHYWGQGTSVTVSSASTKGPSVFPLAPSSKSTSGGTAALGCLVKDYFPEPVTVSWNSGALTSGVHTFPAVLQSSGLYSLSSVVTVPSSSLGTQTYICNVNHKPSNTKVDKKVEPKSCDKTHTCPPCPAPELLGGPSVFLFPPKPKDTLMISRTPEVTCVVVDVSHEDPEVKFNWYVDGVEVHNAKTKPREEQYNSTYRVVSVLTVLHQDWLNGKEYKCKVSNKALPAPIEKTISKAKGQPREPQVYTLPPSRDELTKNQVSLTCLVKGFYPSDIAVEWESNGQPENNYKTTPPVLDSDGSFFLYSKLTVDKSRWQQGNVFSCSVMHEALHNHYTQKSLSLSPGK

SEQ ID NO: 133 - protein, 214 aa, Artificial Sequence
  Synthetic
DIQMTQSPASLSVSVGETVTITCRASDNLYSNLAWYQQKQGKSPQLLVYDATNLADGVPSRFSGSGSGTQYSLKINSLQSEDFGTYYCQHFWGTPLTFGAGTKLELKRTVAAPSVFIFPPSDEQLKSGTASVVCLLNNFYPREAKVQWKVDNALQSGNSQESVTEQDSKDSTYSLSSTLTLSKADYEKHKVYACEVTHQGLSSPVTKSFNRGEC

SEQ ID NO: 134 - protein, 446 aa, Artificial Sequence
  Synthetic
EVQLVQSGAEVKKPGASVKVSCKASGYTFTSYWMHWVRQAPGQRLEWIGEINPTNGRTNYIEKFKSRATLTVDKSASTAYMELSSLRSEDTAVYYCARGTRAYHYWGQGTMVTVSSASTKGPSVFPLAPSSKSTSGGTAALGCLVKDYFPEPVTVSWNSGALTSGVHTFPAVLQSSGLYSLSSVVTVPSSSLGTQTYICNVNHKPSNTKVDKKVEPKSCDKTHTCPPCPAPELLGGPSVFLFPPKPKDTLMISRTPEVTCVVVDVSHEDPEVKFNWYVDGVEVHNAKTKPREEQYNSTYRVVSVLTVLHQDWLNGKEYKCKVSNKALPAPIEKTISKAKGQPREPQVYTLPPSRDELTKNQVSLTCLVKGFYPSDIAVEWESNGQPENNYKTTPPVLDSDGSFFLYSKLTVDKSRWQQGNVFSCSVMHEALHNHYTQKSLSLSPGK

SEQ ID NO: 135 - protein, 214 aa, Artificial Sequence
  Synthetic
DIQMTQSPSSLSASVGDRVTITCRASDNLYSNLAWYQQKPGKSPKLLVYDATNLADGVPSRFSGSGSGTDYTLTISSLQPEDFATYYCQHFWGTPLTFGQGTKVEIKRTVAAPSVFIFPPSDEQLKSGTASVVCLLNNFYPREAKVQWKVDNALQSGNSQESVTEQDSKDSTYSLSSTLTLSKADYEKHKVYACEVTHQGLSSPVTKSFNRGEC

SEQ ID NO: 136 - protein, 226 aa, Artificial Sequence
  Synthetic
QVQLQQPGAELVKPGASVKLSCKASGYTFTSYWMHWVKQRPGQGLEWIGEINPTNGRTNYIEKFKSKATLTVDKSSSTAYMQLSSLTSEDSAVYYCARGTRAYHYWGQGTSVTVSSASTKGPSVFPLAPSSKSTSGGTAALGCLVKDYFPEPVTVSWNSGALTSGVHTFPAVLQSSGLYSLSSVVTVPSSSLGTQTYICNVNHKPSNTKVDKKVEPKSCDKTHTCP

SEQ ID NO: 137 - protein, 226 aa, Artificial Sequence
  Synthetic
EVQLVQSGAEVKKPGASVKVSCKASGYTFTSYWMHWVRQAPGQRLEWIGEINPTNGRTNYIEKFKSRATLTVDKSASTAYMELSSLRSEDTAVYYCARGTRAYHYWGQGTMVTVSSASTKGPSVFPLAPSSKSTSGGTAALGCLVKDYFPEPVTVSWNSGALTSGVHTFPAVLQSSGLYSLSSVVTVPSSSLGTQTYICNVNHKPSNTKVDKKVEPKSCDKTHTCP

SEQ ID NO: 138 - protein, 8 aa, Artificial Sequence
  Synthetic
GYSFTSYW

SEQ ID NO: 139 - protein, 8 aa, Artificial Sequence
  Synthetic
IYPGDSDT

SEQ ID NO: 140 - protein, 15 aa, Artificial Sequence
  Synthetic
ARFPYDSSGYYSFDY

SEQ ID NO: 141 - protein, 6 aa, Artificial Sequence
  Synthetic
QSISSY

SEQ ID NO: 142 - protein, 3 aa, Artificial Sequence
  Synthetic
AAS

SEQ ID NO: 143 - protein, 9 aa, Artificial Sequence
  Synthetic
QQSYSTPLT

SEQ ID NO: 144 - protein, 5 aa, Artificial Sequence
  Synthetic
SYWIG

SEQ ID NO: 145 - protein, 18 aa, Artificial Sequence
  Synthetic
IIYPGDSDTRYSPSFQGQ

SEQ ID NO: 146 - protein, 13 aa, Artificial Sequence
  Synthetic
FPYDSSGYYSFDY

SEQ ID NO: 147 - protein, 11 aa, Artificial Sequence
  Synthetic
RASQSISSYLN

SEQ ID NO: 148 - protein, 7 aa, Artificial Sequence
  Synthetic
AASSLQS

SEQ ID NO: 149 - protein, 7 aa, Artificial Sequence
  Synthetic
GYSFTSY

SEQ ID NO: 150 - protein, 3 aa, Artificial Sequence
  Synthetic
GDS

SEQ ID NO: 151 - protein, 11 aa, Artificial Sequence
  Synthetic
PYDSSGYYSFD

SEQ ID NO: 152 - protein, 7 aa, Artificial Sequence
  Synthetic
SQSISSY

SEQ ID NO: 153 - protein, 6 aa, Artificial Sequence
  Synthetic
SYSTPL

SEQ ID NO: 154 - protein, 122 aa, Artificial Sequence
  Synthetic
QVQLVQSGAEVKKPGESLKISCKGSGYSFTSYWIGWVRQMPGKGLEWMGIIYPGDSDTRYSPSFQGQVTISADKSISTAYLQWSSLKASDTAMYYCARFPYDSSGYYSFDYWGQGTLVTVSS

SEQ ID NO: 155 - protein, 107 aa, Artificial Sequence [sequence omitted]

SEQ ID NO: 156 - protein, 452 aa, Artificial Sequence
  Synthetic
QVQLVQSGAEVKKPGESLKISCKGSGYSFTSYWIGWVRQMPGKGLEWMGIIYPGDSDTRYSPSFQGQVTISADKSISTAYLQWSSLKASDTAMYYCARFPYDSSGYYSFDYWGQGTLVTVSSASTKGPSVFPLAPSSKSTSGGTAALGCLVKDYFPEPVTVSWNSGALTSGVHTFPAVLQSSGLYSLSSVVTVPSSSLGTQTYICNVNHKPSNTKVDKKVEPKSCDKTHTCPPCPAPELLGGPSVFLFPPKPKDTLMISRTPEVTCVVVDVSHEDPEVKFNWYVDGVEVHNAKTKPREEQYNSTYRVVSVLTVLHQDWLNGKEYKCKVSNKALPAPIEKTISKAKGQPREPQVYTLPPSRDELTKNQVSLTCLVKGFYPSDIAVEWESNGQPENNYKTTPPVLDSDGSFFLYSKLTVDKSRWQQGNVFSCSVMHEALHNHYTQKSLSLSPGK

SEQ ID NO: 157 - protein, 214 aa, Artificial Sequence
  Synthetic
DIQMTQSPSSLSASVGDRVTITCRASQSISSYLNWYQQKPGKAPKLLIYAASSLQSGVPSRFSGSGSGTDFTLTISSLQPEDFATYYCQQSYSTPLTFGGGTKVEIKRTVAAPSVFIFPPSDEQLKSGTASVVCLLNNFYPREAKVQWKVDNALQSGNSQESVTEQDSKDSTYSLSSTLTLSKADYEKHKVYACEVTHQGLSSPVTKSFNRGEC

SEQ ID NO: 158 - protein, 232 aa, Artificial Sequence
  Synthetic
QVQLVQSGAEVKKPGESLKISCKGSGYSFTSYWIGWVRQMPGKGLEWMGIIYPGDSDTRYSPSFQGQVTISADKSISTAYLQWSSLKASDTAMYYCARFPYDSSGYYSFDYWGQGTLVTVSSASTKGPSVFPLAPSSKSTSGGTAALGCLVKDYFPEPVTVSWNSGALTSGVHTFPAVLQSSGLYSLSSVVTVPSSSLGTQTYICNVNHKPSNTKVDKKVEPKSCDKTHTCP

SEQ ID NO: 159 - protein, 230 aa, Artificial Sequence
  Synthetic
QVQLVQSGAEVKKPGESLKISCKGSGYSFTSYWIGWVRQMPGKGLEWMGIIYPGDSDTRYSPSFQGQVTISADKSISTAYLQWSSLKASDTAMYYCARFPYDSSGYYSFDYWGQGTLVTVSSASTKGPSVFPLAPSSKSTSGGTAALGCLVKDYFPEPVTVSWNSGALTSGVHTFPAVLQSSGLYSLSSVVTVPSSSLGTQTYICNVNHKPSNTKVDKKVEPKSCDKTHT

SEQ ID NO: 160 - DNA, 1574 bp, Homo Sapiens
atggccctcccgacaccctcggacagcaccctccccgcggaagcccggggacgaggacggcgacggagactcgtttggaccccgagccaaagcgaggccctgcgagcctgctttgagcggaacccgtacccgggcatcgccaccagagaacggctggcccaggccatcggcattccggagcccagggtccagatttggtttcagaatgagaggtcacgccagctgaggcagcaccggcgggaatctcggccctggcccgggagacgcggcccgccagaaggccggcgaaagcggaccgccgtcaccggatcccagaccgccctgctcctccgagcctttgagaaggatcgctttccaggcatcgccgcccgggaggagctggccagagagacgggcctcccggagtccaggattcagatctggtttcagaatcgaagggccaggcacccgggacagggtggcagggcgcccgcgcaggcaggcggcctgtgcagcgcggcccccggcgggggtcaccctgctccctcgtgggtcgccttcgcccacaccggcgcgtggggaacggggcttcccgcaccccacgtgccctgcgcgcctggggctctcccacagggggctttcgtgagccaggcagcgagggccgcccccgcgctgcagcccagccaggccgcgccggcagaggggatctcccaacctgccccggcgcgcggggatttcgcctacgccgccccggctcctccggacggggcgctctcccaccctcaggctcctcgctggcctccgcacccgggcaaaagccgggaggaccgggacccgcagcgcgacggcctgccgggcccctgcgcggtggcacagcctgggcccgctcaagcggggccgcagggccaaggggtgcttgcgccacccacgtcccaggggagtccgtggtggggctggggccggggtccccaggtcgccggggcggcgtgggaaccccaagccggggcagctccacctccccagcccgcgcccccggacgcctccgcctccgcgcggcaggggcagatgcaaggcatcccggcgccctcccaggcgctccaggagccggcgccctggtctgcactcccctgcggcctgctgctggatgagctcctggcgagcccggagtttctgcagcaggcgcaacctctcctagaaacggaggccccgggggagctggaggcctcggaagaggccgcctcgctggaagcacccctcagcgaggaagaataccgggctctgctggaggagctttaggacgcggggtctaggcccggtgagagactccacaccgcggagaactgccattctttcctgggcatcccggggatcccagagccggcccaggtaccagcagacctgcgcgcagtgcgcaccccggctgacgtgcaagggagctcgctggcctctctgtgcccttgttcttccgtgaaattctggctgaatgtctccccccaccttccgacgctgtctaggcaaacctggattagagttacatctcctggatgattagttcagagatatattaaaatgccccctccctgtggatcctatag

SEQ ID NO: 161 - DNA, 1710 bp, Homo Sapiens
atggccctcccgacaccctcggacagcaccctccccgcggaagcccggggacgaggacggcgacggagactcgtttggaccccgagccaaagcgaggccctgcgagcctgctttgagcggaacccgtacccgggcatcgccaccagagaacggctggcccaggccatcggcattccggagcccagggtccagatttggtttcagaatgagaggtcacgccagctgaggcagcaccggcgggaatctcggccctggcccgggagacgcggcccgccagaaggccggcgaaagcggaccgccgtcaccggatcccagaccgccctgctcctccgagcctttgagaaggatcgctttccaggcatcgccgcccgggaggagctggccagagagacgggcctcccggagtccaggattcagatctggtttcagaatcgaagggccaggcacccgggacagggtggcagggcgcccgcgcaggcaggcggcctgtgcagcgcggcccccggcgggggtcaccctgctccctcgtgggtcgccttcgcccacaccggcgcgtggggaacggggcttcccgcaccccacgtgccctgcgcgcctggggctctcccacagggggctttcgtgagccaggcagcgagggccgcccccgcgctgcagcccagccaggccgcgccggcagaggggatctcccaacctgccccggcgcgcggggatttcgcctacgccgccccggctcctccggacggggcgctctcccaccctcaggctcctcggtggcctccgcacccgggcaaaagccgggaggaccgggacccgcagcgcgacggcctgccgggcccctgcgcggtggcacagcctgggcccgctcaagcggggccgcagggccaaggggtgcttgcgccacccacgtcccaggggagtccgtggtggggctggggccggggtccccaggtcgccggggcggcgtgggaaccccaagccggggcagctccacctccccagcccgcgcccccggacgcctccgcctccgcgcggcaggggcagatgcaaggcatcccggcgccctcccaggcgctccaggagccggcgccctggtctgcactcccctgcggcctgctgctggatgagctcctggcgagcccggagtttctgcagcaggcgcaacctctcctagaaacggaggccccgggggagctggaggcctcggaagaggccgcctcgctggaagcacccctcagcgaggaagaataccgggctctgctggaggagctttaggacgcggggttgggacggggtcgggtggttcggggcagggcggtggcctctctttcgcggggaacacctggctggctacggaggggcgtgtctccgccccgccccctccaccgggctgaccggcctgggattcctgccttctaggtctaggcccggtgagagactccactccgcggagaactgcctttctttcctgggcatcccggggatcccagagccggcccaggtaccagcagacctgcgcgcagtgcgcaccccggctgacgtgcaagggagctcgctggcctctctgtgcccttgttcttccgtgaaattctggctgaatgtctccccccaccttccgacgctgtctaggcaaacctggattagagttacatctcctggatgattagttcagagatatattaaaatgccccctccctgtggatcctatag

SEQ ID NO: 162 - DNA, 2024 bp, Mus musculus
atggcagaagctggcagccctgttggtggcagtggtgtggcacgggaatcccggcggcgcaggaagacggtttggcaggcctggcaagagcaggccctgctatcaactttcaagaagaagagatacctgagcttcaaggagaggaaggagctggccaagcgaatgggggtctcagattgccgcatccgcgtgtggtttcagaaccgcaggaatcgcagtggagaggaggggcatgcctcaaagaggtccatcagaggctccaggcggctagcctcgccacagctccaggaagagcttggatccaggccacagggtagaggcatgcgctcatctggcagaaggcctcgcactcgactcacctcgctacagctcaggatcctagggcaagcctttgagaggaacccacgaccaggctttgctaccagggaggagctggcgcgtgacacagggttgcccgaggacacgatccacatatggtttcaaaaccgaagagctcggcggcgccacaggaggggcaggcccacagctcaagatcaagacttgctggcgtcacaagggtcggatggggcccctgcaggtccggaaggcagagagcgtgaaggtgcccaggagaacttgttgccacaggaagaagcaggaagtacgggcatggatacctcgagccctagcgacttgccctccttctgcggagagtcccagcctttccaagtggcacagccccgtggagcaggccaacaagaggcccccactcgagcaggcaacgcaggctctctggaacccctccttgatcagctgctggatgaagtccaagtagaagagcctgctccagcccctctgaatttggatggagaccctggtggcagggtgcatgaaggttcccaggagagcttttggccacaggaagaagcaggaagtacaggcatggatacttctagccccagcgactcaaactccttctgcagagagtcccagccttcccaagtggcacagccctgtggagcgggccaagaagatgcccgcactcaagcagacagcacaggccctctggaactcctcctccttgatcaactgctggacgaagtccaaaaggaagagcatgtgccagtcccactggattggggtagaaatcctggcagcagggagcatgaaggttcccaggacagcttactgcccctggaggaagcagtaaattcgggcatggatacctcgatccctagcatctggccaaccttctgcagagaatcccagcctccccaagtggcacagccctctggaccaggccaagcacaggcccccactcaaggtgggaacacggaccccctggagctcttcctctatcaactgttggatgaagtccaagtagaagagcatgctccagcccctctgaattgggatgtagatcctggtggcagggtgcatgaaggttcgtgggagagcttttggccacaggaagaagcaggaagtacaggcctggatacttcaagccccagcgactcaaactccttcttcagagagtccaagccttcccaagtggcacagcgccgtggagcgggccaagaagatgcccgcactcaagcagacagcacaggccctctggaactcctcctctttgatcaactgctggacgaagtccaaaaggaagagcatgtgccagccccactggattggggtagaaatcctggcagcatggagcatgaaggttcccaggacagcttactgcccctggaggaagcagcaaattcgggcagggatacctcgatccctagcatctggccagccttctgcagaaaatcccagcctccccaagtggcacagccctctggaccaggccaagcacaggcccccattcaaggtgggaacacggaccccctggagctcttccttgatcaactgctgaccgaagtccaacttgaggagcaggggcctgcccctgtgaatgtggaggaaacatgggagcaaatggacacaacacctatctgcctctcacttcagaagaatatcagactcttctagatatgctctga

SEQ ID NO: 163 - DNA, 19 bp, Artificial Sequence
  Synthetic
atggccctcccgacaccct

SEQ ID NO: 164 - DNA, 19 bp, Artificial Sequence
  Synthetic
tggccctcccgacaccctc

SEQ ID NO: 165 - DNA, 19 bp, Artificial Sequence
  Synthetic
ggccctcccgacaccctcg

SEQ ID NO: 166 - DNA, 19 bp, Artificial Sequence
  Synthetic
gccctcccgacaccctcgg

SEQ ID NO: 167 - DNA, 19 bp, Artificial Sequence
  Synthetic
ccctcccgacaccctcgga

SEQ ID NO: 168 - DNA, 19 bp, Artificial Sequence
  Synthetic
cctcccgacaccctcggac

SEQ ID NO: 169 - DNA, 19 bp, Artificial Sequence
  Synthetic
ctcccgacaccctcggaca

SEQ ID NO: 170 - DNA, 19 bp, Artificial Sequence
  Synthetic
tcccgacaccctcggacag

SEQ ID NO: 171 - DNA, 19 bp, Artificial Sequence
  Synthetic
cccgacaccctcggacagc

SEQ ID NO: 172 - DNA, 19 bp, Artificial Sequence
  Synthetic
ccgacaccctcggacagca

SEQ ID NO: 173 - DNA, 19 bp, Artificial Sequence
  Synthetic
cgacaccctcggacagcac

SEQ ID NO: 174 - DNA, 19 bp, Artificial Sequence
  Synthetic
gacaccctcggacagcacc

SEQ ID NO: 175 - DNA, 19 bp, Artificial Sequence
  Synthetic
acaccctcggacagcaccc

SEQ ID NO: 176 - DNA, 19 bp, Artificial Sequence
  Synthetic
caccctcggacagcaccct

SEQ ID NO: 177 - DNA, 19 bp, Artificial Sequence
  Synthetic
accctcggacagcaccctc

SEQ ID NO: 178 - DNA, 19 bp, Artificial Sequence
  Synthetic
ccctcggacagcaccctcc

SEQ ID NO: 179 - DNA, 19 bp, Artificial Sequence
  Synthetic
cctcggacagcaccctccc

SEQ ID NO: 180 - DNA, 19 bp, Artificial Sequence
  Synthetic
ctcggacagcaccctcccc

SEQ ID NO: 181 - DNA, 19 bp, Artificial Sequence
  Synthetic
tcggacagcaccctccccg

SEQ ID NO: 182 - DNA, 19 bp, Artificial Sequence
  Synthetic
cggacagcaccctccccgc

SEQ ID NO: 183 - DNA, 19 bp, Artificial Sequence
  Synthetic
ggacagcaccctccccgcg

SEQ ID NO: 184 - DNA, 19 bp, Artificial Sequence
  Synthetic
gacagcaccctccccgcgg

SEQ ID NO: 185 - DNA, 19 bp, Artificial Sequence
  Synthetic
acagcaccctccccgcgga

SEQ ID NO: 186 - DNA, 19 bp, Artificial Sequence
  Synthetic
cagcaccctccccgcggaa

SEQ ID NO: 187 - DNA, 19 bp, Artificial Sequence
  Synthetic
agcaccctccccgcggaag

SEQ ID NO: 188 - DNA, 19 bp, Artificial Sequence
  Synthetic
gcaccctccccgcggaagc

SEQ ID NO: 189 - DNA, 19 bp, Artificial Sequence
  Synthetic
caccctccccgcggaagcc

SEQ ID NO: 190 - DNA, 19 bp, Artificial Sequence
  Synthetic
accctccccgcggaagccc

SEQ ID NO: 191 - DNA, 19 bp, Artificial Sequence
  Synthetic
ccctccccgcggaagcccg

SEQ ID NO: 192 - DNA, 19 bp, Artificial Sequence
  Synthetic
cctccccgcggaagcccgg

SEQ ID NO: 193 - DNA, 19 bp, Artificial Sequence
  Synthetic
ctccccgcggaagcccggg

SEQ ID NO: 194 - DNA, 19 bp, Artificial Sequence
  Synthetic
tccccgcggaagcccgggg

SEQ ID NO: 195 - DNA, 19 bp, Artificial Sequence
  Synthetic
ccccgcggaagcccgggga

SEQ ID NO: 196 - DNA, 19 bp, Artificial Sequence
  Synthetic
cccgcggaagcccggggac

SEQ ID NO: 197 - DNA, 19 bp, Artificial Sequence
  Synthetic
ccgcggaagcccggggacg

SEQ ID NO: 198 - DNA, 19 bp, Artificial Sequence
  Synthetic
cgcggaagcccggggacga

SEQ ID NO: 199 - DNA, 19 bp, Artificial Sequence
  Synthetic
gcggaagcccggggacgag

SEQ ID NO: 200 - DNA, 19 bp, Artificial Sequence
  Synthetic
cggaagcccggggacgagg

SEQ ID NO: 201 - DNA, 19 bp, Artificial Sequence
  Synthetic
ggaagcccggggacgagga

SEQ ID NO: 202 - DNA, 19 bp, Artificial Sequence
  Synthetic
gaagcccggggacgaggac

SEQ ID NO: 203 - DNA, 19 bp, Artificial Sequence
  Synthetic
aagcccggggacgaggacg

SEQ ID NO: 204 - DNA, 19 bp, Artificial Sequence
  Synthetic
agcccggggacgaggacgg

SEQ ID NO: 205 - DNA, 19 bp, Artificial Sequence
  Synthetic
gcccggggacgaggacggc

SEQ ID NO: 206 - DNA, 19 bp, Artificial Sequence
  Synthetic
cccggggacgaggacggcg

SEQ ID NO: 207 - DNA, 19 bp, Artificial Sequence
  Synthetic
ccggggacgaggacggcga

SEQ ID NO: 208 - DNA, 19 bp, Artificial Sequence
  Synthetic
cggggacgaggacggcgac

SEQ ID NO: 209 - DNA, 19 bp, Artificial Sequence
  Synthetic
ggggacgaggacggcgacg

SEQ ID NO: 210 - DNA, 19 bp, Artificial Sequence
  Synthetic
gggacgaggacggcgacgg

SEQ ID NO: 211 - DNA, 19 bp, Artificial Sequence
  Synthetic
ggacgaggacggcgacgga

SEQ ID NO: 212 - DNA, 19 bp, Artificial Sequence
  Synthetic
gacgaggacggcgacggag

SEQ ID NO: 213 - DNA, 19 bp, Artificial Sequence
  Synthetic
acgaggacggcgacggaga

SEQ ID NO: 214 - DNA, 19 bp, Artificial Sequence
  Synthetic
cgaggacggcgacggagac

SEQ ID NO: 215 - DNA, 19 bp, Artificial Sequence
  Synthetic
gaggacggcgacggagact

SEQ ID NO: 216 - DNA, 19 bp, Artificial Sequence
  Synthetic
aggacggcgacggagactc

SEQ ID NO: 217 - DNA, 19 bp, Artificial Sequence
  Synthetic
ggacggcgacggagactcg

SEQ ID NO: 218 - DNA, 19 bp, Artificial Sequence
  Synthetic
gacggcgacggagactcgt

SEQ ID NO: 219 - DNA, 19 bp, Artificial Sequence
  Synthetic
acggcgacggagactcgtt

SEQ ID NO: 220 - DNA, 19 bp, Artificial Sequence
  Synthetic
cggcgacggagactcgttt

SEQ ID NO: 221 - DNA, 19 bp, Artificial Sequence
  Synthetic
ggcgacggagactcgtttg

SEQ ID NO: 222 - DNA, 19 bp, Artificial Sequence
  Synthetic
gcgacggagactcgtttgg

SEQ ID NO: 223 - DNA, 19 bp, Artificial Sequence
  Synthetic
cgacggagactcgtttgga

SEQ ID NO: 224 - DNA, 19 bp, Artificial Sequence
  Synthetic
gacggagactcgtttggac

SEQ ID NO: 225 - DNA, 19 bp, Artificial Sequence
  Synthetic
acggagactcgtttggacc

SEQ ID NO: 226 - DNA, 19 bp, Artificial Sequence
  Synthetic
cggagactcgtttggaccc

SEQ ID NO: 227 - DNA, 19 bp, Artificial Sequence
  Synthetic
ggagactcgtttggacccc

SEQ ID NO: 228 - DNA, 19 bp, Artificial Sequence
  Synthetic
gagactcgtttggaccccg

SEQ ID NO: 229 - DNA, 19 bp, Artificial Sequence
  Synthetic
agactcgtttggaccccga

SEQ ID NO: 230 - DNA, 19 bp, Artificial Sequence
  Synthetic
gactcgtttggaccccgag

SEQ ID NO: 231 - DNA, 19 bp, Artificial Sequence
  Synthetic
actcgtttggaccccgagc

SEQ ID NO: 232 - DNA, 19 bp, Artificial Sequence
  Synthetic
ctcgtttggaccccgagcc

SEQ ID NO: 233 - DNA, 19 bp, Artificial Sequence
  Synthetic
tcgtttggaccccgagcca

SEQ ID NO: 234 - DNA, 19 bp, Artificial Sequence
  Synthetic
cgtttggaccccgagccaa

SEQ ID NO: 235 - DNA, 19 bp, Artificial Sequence
  Synthetic
gtttggaccccgagccaaa

SEQ ID NO: 236 - DNA, 19 bp, Artificial Sequence
  Synthetic
tttggaccccgagccaaag

SEQ ID NO: 237 - DNA, 19 bp, Artificial Sequence
  Synthetic
ttggaccccgagccaaagc

SEQ ID NO: 238 - DNA, 19 bp, Artificial Sequence
  Synthetic
tggaccccgagccaaagcg

SEQ ID NO: 239 - DNA, 19 bp, Artificial Sequence
  Synthetic
ggaccccgagccaaagcga

SEQ ID NO: 240 - DNA, 19 bp, Artificial Sequence
  Synthetic
gaccccgagccaaagcgag

SEQ ID NO: 241 - DNA, 19 bp, Artificial Sequence
  Synthetic
accccgagccaaagcgagg

SEQ ID NO: 242 - DNA, 19 bp, Artificial Sequence
  Synthetic
ccccgagccaaagcgaggc

SEQ ID NO: 243 - DNA, 19 bp, Artificial Sequence
  Synthetic
cccgagccaaagcgaggcc

SEQ ID NO: 244 - DNA, 19 bp, Artificial Sequence
  Synthetic
ccgagccaaagcgaggccc

SEQ ID NO: 245 - DNA, 19 bp, Artificial Sequence
  Synthetic
cgagccaaagcgaggccct

SEQ ID NO: 246 - DNA, 19 bp, Artificial Sequence
  Synthetic
gagccaaagcgaggccctg

SEQ ID NO: 247 - DNA, 19 bp, Artificial Sequence
  Synthetic
agccaaagcgaggccctgc

SEQ ID NO: 248 - DNA, 19 bp, Artificial Sequence
  Synthetic
gccaaagcgaggccctgcg

SEQ ID NO: 249 - DNA, 19 bp, Artificial Sequence
  Synthetic
ccaaagcgaggccctgcga

SEQ ID NO: 250 - DNA, 19 bp, Artificial Sequence
  Synthetic
caaagcgaggccctgcgag

SEQ ID NO: 251 - DNA, 19 bp, Artificial Sequence
  Synthetic
aaagcgaggccctgcgagc

SEQ ID NO: 252 - DNA, 19 bp, Artificial Sequence
  Synthetic
aagcgaggccctgcgagcc

SEQ ID NO: 253 - DNA, 19 bp, Artificial Sequence
  Synthetic
agcgaggccctgcgagcct

SEQ ID NO: 254 - DNA, 19 bp, Artificial Sequence
  Synthetic
gcgaggccctgcgagcctg

SEQ ID NO: 255 - DNA, 19 bp, Artificial Sequence
  Synthetic
cgaggccctgcgagcctgc

SEQ ID NO: 256 - DNA, 19 bp, Artificial Sequence
  Synthetic
gaggccctgcgagcctgct

SEQ ID NO: 257 - DNA, 19 bp, Artificial Sequence
  Synthetic
aggccctgcgagcctgctt

SEQ ID NO: 258 - DNA, 19 bp, Artificial Sequence
  Synthetic
ggccctgcgagcctgcttt

SEQ ID NO: 259 - DNA, 19 bp, Artificial Sequence
  Synthetic
gccctgcgagcctgctttg

SEQ ID NO: 260 - DNA, 19 bp, Artificial Sequence
  Synthetic
ccctgcgagcctgctttga

SEQ ID NO: 261 - DNA, 19 bp, Artificial Sequence
  Synthetic
cctgcgagcctgctttgag

SEQ ID NO: 262 - DNA, 19 bp, Artificial Sequence
  Synthetic
ctgcgagcctgctttgagc

SEQ ID NO: 263 - DNA, 19 bp, Artificial Sequence
  Synthetic
tgcgagcctgctttgagcg

SEQ ID NO: 264 - DNA, 19 bp, Artificial Sequence
  Synthetic
gcgagcctgctttgagcgg

SEQ ID NO: 265 - DNA, 19 bp, Artificial Sequence
  Synthetic
cgagcctgctttgagcgga

SEQ ID NO: 266 - DNA, 19 bp, Artificial Sequence
  Synthetic
gagcctgctttgagcggaa

SEQ ID NO: 267 - DNA, 19 bp, Artificial Sequence
  Synthetic
agcctgctttgagcggaac

SEQ ID NO: 268 - DNA, 19 bp, Artificial Sequence
  Synthetic
gcctgctttgagcggaacc

SEQ ID NO: 269 - DNA, 19 bp, Artificial Sequence
  Synthetic
cctgctttgagcggaaccc

SEQ ID NO: 270 - DNA, 19 bp, Artificial Sequence
  Synthetic
ctgctttgagcggaacccg

SEQ ID NO: 271 - DNA, 19 bp, Artificial Sequence
  Synthetic
tgctttgagcggaacccgt

SEQ ID NO: 272 - DNA, 19 bp, Artificial Sequence
  Synthetic
gctttgagcggaacccgta

SEQ ID NO: 273 - DNA, 19 bp, Artificial Sequence
  Synthetic
ctttgagcggaacccgtac

SEQ ID NO: 274 - DNA, 19 bp, Artificial Sequence
  Synthetic
tttgagcggaacccgtacc

SEQ ID NO: 275 - DNA, 19 bp, Artificial Sequence
  Synthetic
ttgagcggaacccgtaccc

SEQ ID NO: 276 - DNA, 19 bp, Artificial Sequence
  Synthetic
tgagcggaacccgtacccg

SEQ ID NO: 277 - DNA, 19 bp, Artificial Sequence
  Synthetic
gagcggaacccgtacccgg

SEQ ID NO: 278 - DNA, 19 bp, Artificial Sequence
  Synthetic
agcggaacccgtacccggg

SEQ ID NO: 279 - DNA, 19 bp, Artificial Sequence
  Synthetic
gcggaacccgtacccgggc

SEQ ID NO: 280 - DNA, 19 bp, Artificial Sequence
  Synthetic
cggaacccgtacccgggca

SEQ ID NO: 281 - DNA, 19 bp, Artificial Sequence
  Synthetic
ggaacccgtacccgggcat

SEQ ID NO: 282 - DNA, 19 bp, Artificial Sequence
  Synthetic
gaacccgtacccgggcatc

SEQ ID NO: 283 - DNA, 19 bp, Artificial Sequence
  Synthetic
aacccgtacccgggcatcg

SEQ ID NO: 284 - DNA, 19 bp, Artificial Sequence
  Synthetic
acccgtacccgggcatcgc

SEQ ID NO: 285 - DNA, 19 bp, Artificial Sequence
  Synthetic
cccgtacccgggcatcgcc

SEQ ID NO: 286 - DNA, 19 bp, Artificial Sequence
  Synthetic
ccgtacccgggcatcgcca

SEQ ID NO: 287 - DNA, 19 bp, Artificial Sequence
  Synthetic
cgtacccgggcatcgccac

SEQ ID NO: 288 - DNA, 19 bp, Artificial Sequence
  Synthetic
gtacccgggcatcgccacc

SEQ ID NO: 289 - DNA, 19 bp, Artificial Sequence
  Synthetic
tacccgggcatcgccacca

SEQ ID NO: 290 - DNA, 19 bp, Artificial Sequence
  Synthetic
acccgggcatcgccaccag

SEQ ID NO: 291 - DNA, 19 bp, Artificial Sequence
  Synthetic
cccgggcatcgccaccaga

SEQ ID NO: 292 - DNA, 19 bp, Artificial Sequence
  Synthetic
ccgggcatcgccaccagag

SEQ ID NO: 293 - DNA, 19 bp, Artificial Sequence
  Synthetic
cgggcatcgccaccagaga

SEQ ID NO: 294 - DNA, 19 bp, Artificial Sequence
  Synthetic
gggcatcgccaccagagaa

SEQ ID NO: 295 - DNA, 19 bp, Artificial Sequence
  Synthetic
ggcatcgccaccagagaac

SEQ ID NO: 296 - DNA, 19 bp, Artificial Sequence
  Synthetic
gcatcgccaccagagaacg

SEQ ID NO: 297 - DNA, 19 bp, Artificial Sequence
  Synthetic
catcgccaccagagaacgg

SEQ ID NO: 298 - DNA, 19 bp, Artificial Sequence
  Synthetic
atcgccaccagagaacggc

SEQ ID NO: 299 - DNA, 19 bp, Artificial Sequence
  Synthetic
tcgccaccagagaacggct

SEQ ID NO: 300 - DNA, 19 bp, Artificial Sequence
  Synthetic
cgccaccagagaacggctg

SEQ ID NO: 301 - DNA, 19 bp, Artificial Sequence
  Synthetic
gccaccagagaacggctgg

SEQ ID NO: 302 - DNA, 19 bp, Artificial Sequence
  Synthetic
ccaccagagaacggctggc

SEQ ID NO: 303 - DNA, 19 bp, Artificial Sequence
  Synthetic
caccagagaacggctggcc

SEQ ID NO: 304 - DNA, 19 bp, Artificial Sequence
  Synthetic
accagagaacggctggccc

SEQ ID NO: 305 - DNA, 19 bp, Artificial Sequence
  Synthetic
ccagagaacggctggccca

SEQ ID NO: 306 - DNA, 19 bp, Artificial Sequence
  Synthetic
cagagaacggctggcccag

SEQ ID NO: 307 - DNA, 19 bp, Artificial Sequence
  Synthetic
agagaacggctggcccagg

SEQ ID NO: 308 - DNA, 19 bp, Artificial Sequence
  Synthetic
gagaacggctggcccaggc

SEQ ID NO: 309 - DNA, 19 bp, Artificial Sequence
  Synthetic
agaacggctggcccaggcc

SEQ ID NO: 310 - DNA, 19 bp, Artificial Sequence
  Synthetic
gaacggctggcccaggcca

SEQ ID NO: 311 - DNA, 19 bp, Artificial Sequence
  Synthetic
aacggctggcccaggccat

SEQ ID NO: 312 - DNA, 19 bp, Artificial Sequence
  Synthetic
acggctggcccaggccatc

SEQ ID NO: 313 - DNA, 19 bp, Artificial Sequence
  Synthetic
cggctggcccaggccatcg

SEQ ID NO: 314 - DNA, 19 bp, Artificial Sequence
  Synthetic
ggctggcccaggccatcgg

SEQ ID NO: 315 - DNA, 19 bp, Artificial Sequence
  Synthetic
gctggcccaggccatcggc

SEQ ID NO: 316 - DNA, 19 bp, Artificial Sequence
  Synthetic
ctggcccaggccatcggca

SEQ ID NO: 317 - DNA, 19 bp, Artificial Sequence
  Synthetic
tggcccaggccatcggcat

SEQ ID NO: 318 - DNA, 19 bp, Artificial Sequence
  Synthetic
ggcccaggccatcggcatt

SEQ ID NO: 319 - DNA, 19 bp, Artificial Sequence
  Synthetic
gcccaggccatcggcattc

SEQ ID NO: 320 - DNA, 19 bp, Artificial Sequence
  Synthetic
cccaggccatcggcattcc

SEQ ID NO: 321 - DNA, 19 bp, Artificial Sequence
  Synthetic
ccaggccatcggcattccg

SEQ ID NO: 322 - DNA, 19 bp, Artificial Sequence
  Synthetic
caggccatcggcattccgg

SEQ ID NO: 323 - DNA, 19 bp, Artificial Sequence
  Synthetic
aggccatcggcattccgga

SEQ ID NO: 324 - DNA, 19 bp, Artificial Sequence
  Synthetic
ggccatcggcattccggag

SEQ ID NO: 325 - DNA, 19 bp, Artificial Sequence
  Synthetic
gccatcggcattccggagc

SEQ ID NO: 326 - DNA, 19 bp, Artificial Sequence
  Synthetic
ccatcggcattccggagcc

SEQ ID NO: 327 - DNA, 19 bp, Artificial Sequence
  Synthetic
catcggcattccggagccc

SEQ ID NO: 328 - DNA, 19 bp, Artificial Sequence
  Synthetic
atcggcattccggagccca

SEQ ID NO: 329 - DNA, 19 bp, Artificial Sequence
  Synthetic
tcggcattccggagcccag

SEQ ID NO: 330 - DNA, 19 bp, Artificial Sequence
  Synthetic
cggcattccggagcccagg

SEQ ID NO: 331 - DNA, 19 bp, Artificial Sequence
  Synthetic
ggcattccggagcccaggg

SEQ ID NO: 332 - DNA, 19 bp, Artificial Sequence
  Synthetic
gcattccggagcccagggt

SEQ ID NO: 333 - DNA, 19 bp, Artificial Sequence
  Synthetic
cattccggagcccagggtc

SEQ ID NO: 334 - DNA, 19 bp, Artificial Sequence
  Synthetic
attccggagcccagggtcc

SEQ ID NO: 335 - DNA, 19 bp, Artificial Sequence
  Synthetic
ttccggagcccagggtcca

SEQ ID NO: 336 - DNA, 19 bp, Artificial Sequence
  Synthetic
tccggagcccagggtccag

SEQ ID NO: 337 - DNA, 19 bp, Artificial Sequence
  Synthetic
ccggagcccagggtccaga

SEQ ID NO: 338 - DNA, 19 bp, Artificial Sequence
  Synthetic
cggagcccagggtccagat

SEQ ID NO: 339 - DNA, 19 bp, Artificial Sequence
  Synthetic
ggagcccagggtccagatt

SEQ ID NO: 340 - DNA, 19 bp, Artificial Sequence
  Synthetic
gagcccagggtccagattt

SEQ ID NO: 341 - DNA, 19 bp, Artificial Sequence
  Synthetic
agcccagggtccagatttg

SEQ ID NO: 342 - DNA, 19 bp, Artificial Sequence
  Synthetic
gcccagggtccagatttgg

SEQ ID NO: 343 - DNA, 19 bp, Artificial Sequence
  Synthetic
cccagggtccagatttggt

SEQ ID NO: 344 - DNA, 19 bp, Artificial Sequence
  Synthetic
ccagggtccagatttggtt

SEQ ID NO: 345 - DNA, 19 bp, Artificial Sequence
  Synthetic
cagggtccagatttggttt

SEQ ID NO: 346 - DNA, 19 bp, Artificial Sequence
  Synthetic
agggtccagatttggtttc

SEQ ID NO: 347 - DNA, 19 bp, Artificial Sequence
  Synthetic
gggtccagatttggtttca

SEQ ID NO: 348 - DNA, 19 bp, Artificial Sequence
  Synthetic
ggtccagatttggtttcag

SEQ ID NO: 349 - DNA, 19 bp, Artificial Sequence
  Synthetic
gtccagatttggtttcaga

SEQ ID NO: 350 - DNA, 19 bp, Artificial Sequence
  Synthetic
tccagatttggtttcagaa

SEQ ID NO: 351 - DNA, 19 bp, Artificial Sequence
  Synthetic
ccagatttggtttcagaat

SEQ ID NO: 352 - DNA, 19 bp, Artificial Sequence
  Synthetic
cagatttggtttcagaatg

SEQ ID NO: 353 - DNA, 19 bp, Artificial Sequence
  Synthetic
agatttggtttcagaatga

SEQ ID NO: 354 - DNA, 19 bp, Artificial Sequence
  Synthetic
gatttggtttcagaatgag

SEQ ID NO: 355 - DNA, 19 bp, Artificial Sequence
  Synthetic
atttggtttcagaatgaga

SEQ ID NO: 356 - DNA, 19 bp, Artificial Sequence
  Synthetic
tttggtttcagaatgagag

SEQ ID NO: 357 - DNA, 19 bp, Artificial Sequence
  Synthetic
ttggtttcagaatgagagg

SEQ ID NO: 358 - DNA, 19 bp, Artificial Sequence
  Synthetic
tggtttcagaatgagaggt

SEQ ID NO: 359 - DNA, 19 bp, Artificial Sequence
  Synthetic
ggtttcagaatgagaggtc

SEQ ID NO: 360 - DNA, 19 bp, Artificial Sequence
  Synthetic
gtttcagaatgagaggtca

SEQ ID NO: 361 - DNA, 19 bp, Artificial Sequence
  Synthetic
tttcagaatgagaggtcac

SEQ ID NO: 362 - DNA, 19 bp, Artificial Sequence
  Synthetic
ttcagaatgagaggtcacg

SEQ ID NO: 363 - DNA, 19 bp, Artificial Sequence
  Synthetic
tcagaatgagaggtcacgc

SEQ ID NO: 364 - DNA, 19 bp, Artificial Sequence
  Synthetic
cagaatgagaggtcacgcc

SEQ ID NO: 365 - DNA, 19 bp, Artificial Sequence
  Synthetic
agaatgagaggtcacgcca

SEQ ID NO: 366 - DNA, 19 bp, Artificial Sequence
  Synthetic
gaatgagaggtcacgccag

SEQ ID NO: 367 - DNA, 19 bp, Artificial Sequence
  Synthetic
aatgagaggtcacgccagc

SEQ ID NO: 368 - DNA, 19 bp, Artificial Sequence
  Synthetic
atgagaggtcacgccagct

SEQ ID NO: 369 - DNA, 19 bp, Artificial Sequence
  Synthetic
tgagaggtcacgccagctg

SEQ ID NO: 370 - DNA, 19 bp, Artificial Sequence
  Synthetic
gagaggtcacgccagctga

SEQ ID NO: 371 - DNA, 19 bp, Artificial Sequence
  Synthetic
agaggtcacgccagctgag

SEQ ID NO: 372 - DNA, 19 bp, Artificial Sequence
  Synthetic
gaggtcacgccagctgagg

SEQ ID NO: 373 - DNA, 19 bp, Artificial Sequence
  Synthetic
aggtcacgccagctgaggc

SEQ ID NO: 374 - DNA, 19 bp, Artificial Sequence
  Synthetic
ggtcacgccagctgaggca

SEQ ID NO: 375 - DNA, 19 bp, Artificial Sequence
  Synthetic
gtcacgccagctgaggcag

SEQ ID NO: 376 - DNA, 19 bp, Artificial Sequence
  Synthetic
tcacgccagctgaggcagc

SEQ ID NO: 377 - DNA, 19 bp, Artificial Sequence
  Synthetic
cacgccagctgaggcagca

SEQ ID NO: 378 - DNA, 19 bp, Artificial Sequence
  Synthetic
acgccagctgaggcagcac

SEQ ID NO: 379 - DNA, 19 bp, Artificial Sequence
  Synthetic
cgccagctgaggcagcacc

SEQ ID NO: 380 - DNA, 19 bp, Artificial Sequence
  Synthetic
gccagctgaggcagcaccg

SEQ ID NO: 381 - DNA, 19 bp, Artificial Sequence
  Synthetic
ccagctgaggcagcaccgg

SEQ ID NO: 382 - DNA, 19 bp, Artificial Sequence
  Synthetic
cagctgaggcagcaccggc

SEQ ID NO: 383 - DNA, 19 bp, Artificial Sequence
  Synthetic
agctgaggcagcaccggcg

SEQ ID NO: 384 - DNA, 19 bp, Artificial Sequence
  Synthetic
gctgaggcagcaccggcgg

SEQ ID NO: 385 - DNA, 19 bp, Artificial Sequence
  Synthetic
ctgaggcagcaccggcggg

SEQ ID NO: 386 - DNA, 19 bp, Artificial Sequence
  Synthetic
tgaggcagcaccggcggga

SEQ ID NO: 387 - DNA, 19 bp, Artificial Sequence
  Synthetic
gaggcagcaccggcgggaa

SEQ ID NO: 388 - DNA, 19 bp, Artificial Sequence
  Synthetic
aggcagcaccggcgggaat

SEQ ID NO: 389 - DNA, 19 bp, Artificial Sequence
  Synthetic
ggcagcaccggcgggaatc

SEQ ID NO: 390 - DNA, 19 bp, Artificial Sequence
  Synthetic
gcagcaccggcgggaatct

SEQ ID NO: 391 - DNA, 19 bp, Artificial Sequence
  Synthetic
cagcaccggcgggaatctc

SEQ ID NO: 392 - DNA, 19 bp, Artificial Sequence
  Synthetic
agcaccggcgggaatctcg

SEQ ID NO: 393 - DNA, 19 bp, Artificial Sequence
  Synthetic
gcaccggcgggaatctcgg

SEQ ID NO: 394 - DNA, 19 bp, Artificial Sequence
  Synthetic
caccggcgggaatctcggc

SEQ ID NO: 395 - DNA, 19 bp, Artificial Sequence
  Synthetic
accggcgggaatctcggcc

SEQ ID NO: 396 - DNA, 19 bp, Artificial Sequence
  Synthetic
ccggcgggaatctcggccc

SEQ ID NO: 397 - DNA, 19 bp, Artificial Sequence
  Synthetic
cggcgggaatctcggccct

SEQ ID NO: 398 - DNA, 19 bp, Artificial Sequence
  Synthetic
ggcgggaatctcggccctg

SEQ ID NO: 399 - DNA, 19 bp, Artificial Sequence
  Synthetic
gcgggaatctcggccctgg

SEQ ID NO: 400 - DNA, 19 bp, Artificial Sequence
  Synthetic
cgggaatctcggccctggc

SEQ ID NO: 401 - DNA, 19 bp, Artificial Sequence
  Synthetic
gggaatctcggccctggcc

SEQ ID NO: 402 - DNA, 19 bp, Artificial Sequence
  Synthetic
ggaatctcggccctggccc

SEQ ID NO: 403 - DNA, 19 bp, Artificial Sequence
  Synthetic
gaatctcggccctggcccg

SEQ ID NO: 404 - DNA, 19 bp, Artificial Sequence
  Synthetic
aatctcggccctggcccgg

SEQ ID NO: 405 - DNA, 19 bp, Artificial Sequence
  Synthetic
atctcggccctggcccggg

SEQ ID NO: 406 - DNA, 19 bp, Artificial Sequence
  Synthetic
tctcggccctggcccggga

SEQ ID NO: 407 - DNA, 19 bp, Artificial Sequence
  Synthetic
ctcggccctggcccgggag

SEQ ID NO: 408 - DNA, 19 bp, Artificial Sequence
  Synthetic
tcggccctggcccgggaga

SEQ ID NO: 409 - DNA, 19 bp, Artificial Sequence
  Synthetic
cggccctggcccgggagac

SEQ ID NO: 410 - DNA, 19 bp, Artificial Sequence
  Synthetic
ggccctggcccgggagacg

SEQ ID NO: 411 - DNA, 19 bp, Artificial Sequence
  Synthetic
gccctggcccgggagacgc

SEQ ID NO: 412 - DNA, 19 bp, Artificial Sequence
  Synthetic
ccctggcccgggagacgcg

SEQ ID NO: 413 - DNA, 19 bp, Artificial Sequence
  Synthetic
cctggcccgggagacgcgg

SEQ ID NO: 414 - DNA, 19 bp, Artificial Sequence
  Synthetic
ctggcccgggagacgcggc

SEQ ID NO: 415 - DNA, 19 bp, Artificial Sequence
  Synthetic
tggcccgggagacgcggcc

SEQ ID NO: 416 - DNA, 19 bp, Artificial Sequence
  Synthetic
ggcccgggagacgcggccc

SEQ ID NO: 417 - DNA, 19 bp, Artificial Sequence
  Synthetic
gcccgggagacgcggcccg

SEQ ID NO: 418 - DNA, 19 bp, Artificial Sequence
  Synthetic
cccgggagacgcggcccgc

SEQ ID NO: 419 - DNA, 19 bp, Artificial Sequence
  Synthetic
ccgggagacgcggcccgcc

SEQ ID NO: 420 - DNA, 19 bp, Artificial Sequence
  Synthetic
cgggagacgcggcccgcca

SEQ ID NO: 421 - DNA, 19 bp, Artificial Sequence
  Synthetic
gggagacgcggcccgccag

SEQ ID NO: 422 - DNA, 19 bp, Artificial Sequence
  Synthetic
ggagacgcggcccgccaga

SEQ ID NO: 423 - DNA, 19 bp, Artificial Sequence
  Synthetic
gagacgcggcccgccagaa

SEQ ID NO: 424 - DNA, 19 bp, Artificial Sequence
  Synthetic
agacgcggcccgccagaag

SEQ ID NO: 425 - DNA, 19 bp, Artificial Sequence
  Synthetic
gacgcggcccgccagaagg

SEQ ID NO: 426 - DNA, 19 bp, Artificial Sequence
  Synthetic
acgcggcccgccagaaggc

SEQ ID NO: 427 - DNA, 19 bp, Artificial Sequence
  Synthetic
cgcggcccgccagaaggcc

SEQ ID NO: 428 - DNA, 19 bp, Artificial Sequence
  Synthetic
gcggcccgccagaaggccg

SEQ ID NO: 429 - DNA, 19 bp, Artificial Sequence
  Synthetic
cggcccgccagaaggccgg

SEQ ID NO: 430 - DNA, 19 bp, Artificial Sequence
  Synthetic
ggcccgccagaaggccggc

SEQ ID NO: 431 - DNA, 19 bp, Artificial Sequence
  Synthetic
gcccgccagaaggccggcg

SEQ ID NO: 432 - DNA, 19 bp, Artificial Sequence
  Synthetic
cccgccagaaggccggcga

SEQ ID NO: 433 - DNA, 19 bp, Artificial Sequence
  Synthetic
ccgccagaaggccggcgaa

SEQ ID NO: 434 - DNA, 19 bp, Artificial Sequence
  Synthetic
cgccagaaggccggcgaaa

SEQ ID NO: 435 - DNA, 19 bp, Artificial Sequence
  Synthetic
gccagaaggccggcgaaag

SEQ ID NO: 436 - DNA, 19 bp, Artificial Sequence
  Synthetic
ccagaaggccggcgaaagc

SEQ ID NO: 437 - DNA, 19 bp, Artificial Sequence
  Synthetic
cagaaggccggcgaaagcg

SEQ ID NO: 438 - DNA, 19 bp, Artificial Sequence
  Synthetic
agaaggccggcgaaagcgg

SEQ ID NO: 439 - DNA, 19 bp, Artificial Sequence
  Synthetic
gaaggccggcgaaagcgga

SEQ ID NO: 440 - DNA, 19 bp, Artificial Sequence
  Synthetic
aaggccggcgaaagcggac

SEQ ID NO: 441 - DNA, 19 bp, Artificial Sequence
  Synthetic
aggccggcgaaagcggacc

SEQ ID NO: 442 - DNA, 19 bp, Artificial Sequence
  Synthetic
ggccggcgaaagcggaccg

SEQ ID NO: 443 - DNA, 19 bp, Artificial Sequence
  Synthetic
gccggcgaaagcggaccgc

SEQ ID NO: 444 - DNA, 19 bp, Artificial Sequence
  Synthetic
ccggcgaaagcggaccgcc

SEQ ID NO: 445 - DNA, 19 bp, Artificial Sequence
  Synthetic
cggcgaaagcggaccgccg

SEQ ID NO: 446 - DNA, 19 bp, Artificial Sequence
  Synthetic
ggcgaaagcggaccgccgt

SEQ ID NO: 447 - DNA, 19 bp, Artificial Sequence
  Synthetic
gcgaaagcggaccgccgtc

SEQ ID NO: 448 - DNA, 19 bp, Artificial Sequence
  Synthetic
cgaaagcggaccgccgtca

SEQ ID NO: 449 - DNA, 19 bp, Artificial Sequence
  Synthetic
gaaagcggaccgccgtcac

SEQ ID NO: 450 - DNA, 19 bp, Artificial Sequence
  Synthetic
aaagcggaccgccgtcacc

SEQ ID NO: 451 - DNA, 19 bp, Artificial Sequence
  Synthetic
aagcggaccgccgtcaccg

SEQ ID NO: 452 - DNA, 19 bp, Artificial Sequence
  Synthetic
agcggaccgccgtcaccgg

SEQ ID NO: 453 - DNA, 19 bp, Artificial Sequence
  Synthetic
gcggaccgccgtcaccgga

SEQ ID NO: 454 - DNA, 19 bp, Artificial Sequence
  Synthetic
cggaccgccgtcaccggat

SEQ ID NO: 455 - DNA, 19 bp, Artificial Sequence
  Synthetic
ggaccgccgtcaccggatc

SEQ ID NO: 456 - DNA, 19 bp, Artificial Sequence
  Synthetic
gaccgccgtcaccggatcc

SEQ ID NO: 457 - DNA, 19 bp, Artificial Sequence
  Synthetic
accgccgtcaccggatccc

SEQ ID NO: 458 - DNA, 19 bp, Artificial Sequence
  Synthetic
ccgccgtcaccggatccca

SEQ ID NO: 459 - DNA, 19 bp, Artificial Sequence
  Synthetic
cgccgtcaccggatcccag

SEQ ID NO: 460 - DNA, 19 bp, Artificial Sequence
  Synthetic
gccgtcaccggatcccaga

SEQ ID NO: 461 - DNA, 19 bp, Artificial Sequence
  Synthetic
ccgtcaccggatcccagac

SEQ ID NO: 462 - DNA, 19 bp, Artificial Sequence
  Synthetic
cgtcaccggatcccagacc

SEQ ID NO: 463 - DNA, 19 bp, Artificial Sequence
  Synthetic
gtcaccggatcccagaccg

SEQ ID NO: 464 - DNA, 19 bp, Artificial Sequence
  Synthetic
tcaccggatcccagaccgc

SEQ ID NO: 465 - DNA, 19 bp, Artificial Sequence
  Synthetic
caccggatcccagaccgcc

SEQ ID NO: 466 - DNA, 19 bp, Artificial Sequence
  Synthetic
accggatcccagaccgccc

SEQ ID NO: 467 - DNA, 19 bp, Artificial Sequence
  Synthetic
ccggatcccagaccgccct

SEQ ID NO: 468 - DNA, 19 bp, Artificial Sequence
  Synthetic
cggatcccagaccgccctg

SEQ ID NO: 469 - DNA, 19 bp, Artificial Sequence
  Synthetic
ggatcccagaccgccctgc

SEQ ID NO: 470 - DNA, 19 bp, Artificial Sequence
  Synthetic
gatcccagaccgccctgct

SEQ ID NO: 471 - DNA, 19 bp, Artificial Sequence
  Synthetic
atcccagaccgccctgctc

SEQ ID NO: 472 - DNA, 19 bp, Artificial Sequence
  Synthetic
tcccagaccgccctgctcc

SEQ ID NO: 473 - DNA, 19 bp, Artificial Sequence
  Synthetic
cccagaccgccctgctcct

SEQ ID NO: 474 - DNA, 19 bp, Artificial Sequence
  Synthetic
ccagaccgccctgctcctc

SEQ ID NO: 475 - DNA, 19 bp, Artificial Sequence
  Synthetic
cagaccgccctgctcctcc

SEQ ID NO: 476 - DNA, 19 bp, Artificial Sequence
  Synthetic
agaccgccctgctcctccg

SEQ ID NO: 477 - DNA, 19 bp, Artificial Sequence
  Synthetic
gaccgccctgctcctccga

SEQ ID NO: 478 - DNA, 19 bp, Artificial Sequence
  Synthetic
accgccctgctcctccgag

SEQ ID NO: 479 - DNA, 19 bp, Artificial Sequence
  Synthetic
ccgccctgctcctccgagc

SEQ ID NO: 480 - DNA, 19 bp, Artificial Sequence
  Synthetic
cgccctgctcctccgagcc

SEQ ID NO: 481 - DNA, 19 bp, Artificial Sequence
  Synthetic
gccctgctcctccgagcct

SEQ ID NO: 482 - DNA, 19 bp, Artificial Sequence
  Synthetic
ccctgctcctccgagcctt

SEQ ID NO: 483 - DNA, 19 bp, Artificial Sequence
  Synthetic
cctgctcctccgagccttt

SEQ ID NO: 484 - DNA, 19 bp, Artificial Sequence
  Synthetic
ctgctcctccgagcctttg

SEQ ID NO: 485 - DNA, 19 bp, Artificial Sequence
  Synthetic
tgctcctccgagcctttga

SEQ ID NO: 486 - DNA, 19 bp, Artificial Sequence
  Synthetic
gctcctccgagcctttgag

SEQ ID NO: 487 - DNA, 19 bp, Artificial Sequence
  Synthetic
ctcctccgagcctttgaga

SEQ ID NO: 488 - DNA, 19 bp, Artificial Sequence
  Synthetic
tcctccgagcctttgagaa

SEQ ID NO: 489 - DNA, 19 bp, Artificial Sequence
  Synthetic
cctccgagcctttgagaag

SEQ ID NO: 490 - DNA, 19 bp, Artificial Sequence
  Synthetic
ctccgagcctttgagaagg

SEQ ID NO: 491 - DNA, 19 bp, Artificial Sequence
  Synthetic
tccgagcctttgagaagga

SEQ ID NO: 492 - DNA, 19 bp, Artificial Sequence
  Synthetic
ccgagcctttgagaaggat

SEQ ID NO: 493 - DNA, 19 bp, Artificial Sequence
  Synthetic
cgagcctttgagaaggatc

SEQ ID NO: 494 - DNA, 19 bp, Artificial Sequence
  Synthetic
gagcctttgagaaggatcg

SEQ ID NO: 495 - DNA, 19 bp, Artificial Sequence
  Synthetic
agcctttgagaaggatcgc

SEQ ID NO: 496 - DNA, 19 bp, Artificial Sequence
  Synthetic
gcctttgagaaggatcgct

SEQ ID NO: 497 - DNA, 19 bp, Artificial Sequence
  Synthetic
cctttgagaaggatcgctt

SEQ ID NO: 498 - DNA, 19 bp, Artificial Sequence
  Synthetic
ctttgagaaggatcgcttt

SEQ ID NO: 499 - DNA, 19 bp, Artificial Sequence
  Synthetic
tttgagaaggatcgctttc

SEQ ID NO: 500 - DNA, 19 bp, Artificial Sequence
  Synthetic
ttgagaaggatcgctttcc

SEQ ID NO: 501 - DNA, 19 bp, Artificial Sequence
  Synthetic
tgagaaggatcgctttcca

SEQ ID NO: 502 - DNA, 19 bp, Artificial Sequence
  Synthetic
gagaaggatcgctttccag

SEQ ID NO: 503 - DNA, 19 bp, Artificial Sequence
  Synthetic
agaaggatcgctttccagg

SEQ ID NO: 504 - DNA, 19 bp, Artificial Sequence
  Synthetic
gaaggatcgctttccaggc

SEQ ID NO: 505 - DNA, 19 bp, Artificial Sequence
  Synthetic
aaggatcgctttccaggca

SEQ ID NO: 506 - DNA, 19 bp, Artificial Sequence
  Synthetic
aggatcgctttccaggcat

SEQ ID NO: 507 - DNA, 19 bp, Artificial Sequence
  Synthetic
ggatcgctttccaggcatc

SEQ ID NO: 508 - DNA, 19 bp, Artificial Sequence
  Synthetic
gatcgctttccaggcatcg

SEQ ID NO: 509 - DNA, 19 bp, Artificial Sequence
  Synthetic
atcgctttccaggcatcgc

SEQ ID NO: 510 - DNA, 19 bp, Artificial Sequence
  Synthetic
tcgctttccaggcatcgcc

SEQ ID NO: 511 - DNA, 19 bp, Artificial Sequence
  Synthetic
cgctttccaggcatcgccg

SEQ ID NO: 512 - DNA, 19 bp, Artificial Sequence
  Synthetic
gctttccaggcatcgccgc

SEQ ID NO: 513 - DNA, 19 bp, Artificial Sequence
  Synthetic
ctttccaggcatcgccgcc

SEQ ID NO: 514 - DNA, 19 bp, Artificial Sequence
  Synthetic
tttccaggcatcgccgccc

SEQ ID NO: 515 - DNA, 19 bp, Artificial Sequence
  Synthetic
ttccaggcatcgccgcccg

SEQ ID NO: 516 - DNA, 19 bp, Artificial Sequence
  Synthetic
tccaggcatcgccgcccgg

SEQ ID NO: 517 - DNA, 19 bp, Artificial Sequence
  Synthetic
ccaggcatcgccgcccggg

SEQ ID NO: 518 - DNA, 19 bp, Artificial Sequence
  Synthetic
caggcatcgccgcccggga

SEQ ID NO: 519 - DNA, 19 bp, Artificial Sequence
  Synthetic
aggcatcgccgcccgggag

SEQ ID NO: 520 - DNA, 19 bp, Artificial Sequence
  Synthetic
ggcatcgccgcccgggagg

SEQ ID NO: 521 - DNA, 19 bp, Artificial Sequence
  Synthetic
gcatcgccgcccgggagga

SEQ ID NO: 522 - DNA, 19 bp, Artificial Sequence
  Synthetic
catcgccgcccgggaggag

SEQ ID NO: 523 - DNA, 19 bp, Artificial Sequence
  Synthetic
atcgccgcccgggaggagc

SEQ ID NO: 524 - DNA, 19 bp, Artificial Sequence
  Synthetic
tcgccgcccgggaggagct

SEQ ID NO: 525 - DNA, 19 bp, Artificial Sequence
  Synthetic
cgccgcccgggaggagctg

SEQ ID NO: 526 - DNA, 19 bp, Artificial Sequence
  Synthetic
gccgcccgggaggagctgg

SEQ ID NO: 527 - DNA, 19 bp, Artificial Sequence
  Synthetic
ccgcccgggaggagctggc

SEQ ID NO: 528 - DNA, 19 bp, Artificial Sequence
  Synthetic
cgcccgggaggagctggcc

SEQ ID NO: 529 - DNA, 19 bp, Artificial Sequence
  Synthetic
gcccgggaggagctggcca

SEQ ID NO: 530 - DNA, 19 bp, Artificial Sequence
  Synthetic
cccgggaggagctggccag

SEQ ID NO: 531 - DNA, 19 bp, Artificial Sequence
  Synthetic
ccgggaggagctggccaga

SEQ ID NO: 532 - DNA, 19 bp, Artificial Sequence
  Synthetic
cgggaggagctggccagag

SEQ ID NO: 533 - DNA, 19 bp, Artificial Sequence
  Synthetic
gggaggagctggccagaga

SEQ ID NO: 534 - DNA, 19 bp, Artificial Sequence
  Synthetic
ggaggagctggccagagag

SEQ ID NO: 535 - DNA, 19 bp, Artificial Sequence
  Synthetic
gaggagctggccagagaga

SEQ ID NO: 536 - DNA, 19 bp, Artificial Sequence
  Synthetic
aggagctggccagagagac

SEQ ID NO: 537 - DNA, 19 bp, Artificial Sequence
  Synthetic
ggagctggccagagagacg

SEQ ID NO: 538 - DNA, 19 bp, Artificial Sequence
  Synthetic
gagctggccagagagacgg

SEQ ID NO: 539 - DNA, 19 bp, Artificial Sequence
  Synthetic
agctggccagagagacggg

SEQ ID NO: 540 - DNA, 19 bp, Artificial Sequence
  Synthetic
gctggccagagagacgggc

SEQ ID NO: 541 - DNA, 19 bp, Artificial Sequence
  Synthetic
ctggccagagagacgggcc

SEQ ID NO: 542 - DNA, 19 bp, Artificial Sequence
  Synthetic
tggccagagagacgggcct

SEQ ID NO: 543 - DNA, 19 bp, Artificial Sequence
  Synthetic
ggccagagagacgggcctc

SEQ ID NO: 544 - DNA, 19 bp, Artificial Sequence
  Synthetic
gccagagagacgggcctcc

SEQ ID NO: 545 - DNA, 19 bp, Artificial Sequence
  Synthetic
ccagagagacgggcctccc

SEQ ID NO: 546 - DNA, 19 bp, Artificial Sequence
  Synthetic
cagagagacgggcctcccg

SEQ ID NO: 547 - DNA, 19 bp, Artificial Sequence
  Synthetic
agagagacgggcctcccgg

SEQ ID NO: 548 - DNA, 19 bp, Artificial Sequence
  Synthetic
gagagacgggcctcccgga

SEQ ID NO: 549 - DNA, 19 bp, Artificial Sequence
  Synthetic
agagacgggcctcccggag

SEQ ID NO: 550 - DNA, 19 bp, Artificial Sequence
  Synthetic
gagacgggcctcccggagt

SEQ ID NO: 551 - DNA, 19 bp, Artificial Sequence
  Synthetic
agacgggcctcccggagtc

SEQ ID NO: 552 - DNA, 19 bp, Artificial Sequence
  Synthetic
gacgggcctcccggagtcc

SEQ ID NO: 553 - DNA, 19 bp, Artificial Sequence
  Synthetic
acgggcctcccggagtcca

SEQ ID NO: 554 - DNA, 19 bp, Artificial Sequence
  Synthetic
cgggcctcccggagtccag

SEQ ID NO: 555 - DNA, 19 bp, Artificial Sequence
  Synthetic
gggcctcccggagtccagg

SEQ ID NO: 556 - DNA, 19 bp, Artificial Sequence
  Synthetic
ggcctcccggagtccagga

SEQ ID NO: 557 - DNA, 19 bp, Artificial Sequence
  Synthetic
gcctcccggagtccaggat

SEQ ID NO: 558 - DNA, 19 bp, Artificial Sequence
  Synthetic
cctcccggagtccaggatt

SEQ ID NO: 559 - DNA, 19 bp, Artificial Sequence
  Synthetic
ctcccggagtccaggattc

SEQ ID NO: 560 - DNA, 19 bp, Artificial Sequence
  Synthetic
tcccggagtccaggattca

SEQ ID NO: 561 - DNA, 19 bp, Artificial Sequence
  Synthetic
cccggagtccaggattcag

SEQ ID NO: 562 - DNA, 19 bp, Artificial Sequence
  Synthetic
ccggagtccaggattcaga

SEQ ID NO: 563 - DNA, 19 bp, Artificial Sequence
  Synthetic
cggagtccaggattcagat

SEQ ID NO: 564 - DNA, 19 bp, Artificial Sequence
  Synthetic
ggagtccaggattcagatc

SEQ ID NO: 565 - DNA, 19 bp, Artificial Sequence
  Synthetic
gagtccaggattcagatct

SEQ ID NO: 566 - DNA, 19 bp, Artificial Sequence
  Synthetic
agtccaggattcagatctg

SEQ ID NO: 567 - DNA, 19 bp, Artificial Sequence
  Synthetic
gtccaggattcagatctgg

SEQ ID NO: 568 - DNA, 19 bp, Artificial Sequence
  Synthetic
tccaggattcagatctggt

SEQ ID NO: 569 - DNA, 19 bp, Artificial Sequence
  Synthetic
ccaggattcagatctggtt

SEQ ID NO: 570 - DNA, 19 bp, Artificial Sequence
  Synthetic
caggattcagatctggttt

SEQ ID NO: 571 - DNA, 19 bp, Artificial Sequence
  Synthetic
aggattcagatctggtttc

SEQ ID NO: 572 - DNA, 19 bp, Artificial Sequence
  Synthetic
ggattcagatctggtttca

SEQ ID NO: 573 - DNA, 19 bp, Artificial Sequence
  Synthetic
gattcagatctggtttcag

SEQ ID NO: 574 - DNA, 19 bp, Artificial Sequence
  Synthetic
attcagatctggtttcaga

SEQ ID NO: 575 - DNA, 19 bp, Artificial Sequence
  Synthetic
ttcagatctggtttcagaa

SEQ ID NO: 576 - DNA, 19 bp, Artificial Sequence
  Synthetic
tcagatctggtttcagaat

SEQ ID NO: 577 - DNA, 19 bp, Artificial Sequence
  Synthetic
cagatctggtttcagaatc

SEQ ID NO: 578 - DNA, 19 bp, Artificial Sequence
  Synthetic
agatctggtttcagaatcg

SEQ ID NO: 579 - DNA, 19 bp, Artificial Sequence
  Synthetic
gatctggtttcagaatcga

SEQ ID NO: 580 - DNA, 19 bp, Artificial Sequence
  Synthetic
atctggtttcagaatcgaa

SEQ ID NO: 581 - DNA, 19 bp, Artificial Sequence
  Synthetic
tctggtttcagaatcgaag

SEQ ID NO: 582 - DNA, 19 bp, Artificial Sequence
  Synthetic
ctggtttcagaatcgaagg

SEQ ID NO: 583 - DNA, 19 bp, Artificial Sequence
  Synthetic
tggtttcagaatcgaaggg

SEQ ID NO: 584 - DNA, 19 bp, Artificial Sequence
  Synthetic
ggtttcagaatcgaagggc

SEQ ID NO: 585 - DNA, 19 bp, Artificial Sequence
  Synthetic
gtttcagaatcgaagggcc

SEQ ID NO: 586 - DNA, 19 bp, Artificial Sequence
  Synthetic
tttcagaatcgaagggcca

SEQ ID NO: 587 - DNA, 19 bp, Artificial Sequence
  Synthetic
ttcagaatcgaagggccag

SEQ ID NO: 588 - DNA, 19 bp, Artificial Sequence
  Synthetic
tcagaatcgaagggccagg

SEQ ID NO: 589 - DNA, 19 bp, Artificial Sequence
  Synthetic
cagaatcgaagggccaggc

SEQ ID NO: 590 - DNA, 19 bp, Artificial Sequence
  Synthetic
agaatcgaagggccaggca

SEQ ID NO: 591 - DNA, 19 bp, Artificial Sequence
  Synthetic
gaatcgaagggccaggcac

SEQ ID NO: 592 - DNA, 19 bp, Artificial Sequence
  Synthetic
aatcgaagggccaggcacc

SEQ ID NO: 593 - DNA, 19 bp, Artificial Sequence
  Synthetic
atcgaagggccaggcaccc

SEQ ID NO: 594 - DNA, 19 bp, Artificial Sequence
  Synthetic
tcgaagggccaggcacccg

SEQ ID NO: 595 - DNA, 19 bp, Artificial Sequence
  Synthetic
cgaagggccaggcacccgg

SEQ ID NO: 596 - DNA, 19 bp, Artificial Sequence
  Synthetic
gaagggccaggcacccggg

SEQ ID NO: 597 - DNA, 19 bp, Artificial Sequence
  Synthetic
aagggccaggcacccggga

SEQ ID NO: 598 - DNA, 19 bp, Artificial Sequence
  Synthetic
agggccaggcacccgggac

SEQ ID NO: 599 - DNA, 19 bp, Artificial Sequence
  Synthetic
gggccaggcacccgggaca

SEQ ID NO: 600 - DNA, 19 bp, Artificial Sequence
  Synthetic
ggccaggcacccgggacag

SEQ ID NO: 601 - DNA, 19 bp, Artificial Sequence
  Synthetic
gccaggcacccgggacagg

SEQ ID NO: 602 - DNA, 19 bp, Artificial Sequence
  Synthetic
ccaggcacccgggacaggg

SEQ ID NO: 603 - DNA, 19 bp, Artificial Sequence
  Synthetic
caggcacccgggacagggt

SEQ ID NO: 604 - DNA, 19 bp, Artificial Sequence
  Synthetic
aggcacccgggacagggtg

SEQ ID NO: 605 - DNA, 19 bp, Artificial Sequence
  Synthetic
ggcacccgggacagggtgg

SEQ ID NO: 606 - DNA, 19 bp, Artificial Sequence
  Synthetic
gcacccgggacagggtggc

SEQ ID NO: 607 - DNA, 19 bp, Artificial Sequence
  Synthetic
cacccgggacagggtggca

SEQ ID NO: 608 - DNA, 19 bp, Artificial Sequence
  Synthetic
acccgggacagggtggcag

SEQ ID NO: 609 - DNA, 19 bp, Artificial Sequence
  Synthetic
cccgggacagggtggcagg

SEQ ID NO: 610 - DNA, 19 bp, Artificial Sequence
  Synthetic
ccgggacagggtggcaggg

SEQ ID NO: 611 - DNA, 19 bp, Artificial Sequence
  Synthetic
cgggacagggtggcagggc

SEQ ID NO: 612 - DNA, 19 bp, Artificial Sequence
  Synthetic
gggacagggtggcagggcg

SEQ ID NO: 613 - DNA, 19 bp, Artificial Sequence
  Synthetic
ggacagggtggcagggcgc

SEQ ID NO: 614 - DNA, 19 bp, Artificial Sequence
  Synthetic
gacagggtggcagggcgcc

SEQ ID NO: 615 - DNA, 19 bp, Artificial Sequence
  Synthetic
acagggtggcagggcgccc

SEQ ID NO: 616 - DNA, 19 bp, Artificial Sequence
  Synthetic
cagggtggcagggcgcccg

SEQ ID NO: 617 - DNA, 19 bp, Artificial Sequence
  Synthetic
agggtggcagggcgcccgc

SEQ ID NO: 618 - DNA, 19 bp, Artificial Sequence
  Synthetic
gggtggcagggcgcccgcg

SEQ ID NO: 619 - DNA, 19 bp, Artificial Sequence
  Synthetic
ggtggcagggcgcccgcgc

SEQ ID NO: 620 - DNA, 19 bp, Artificial Sequence
  Synthetic
gtggcagggcgcccgcgca

SEQ ID NO: 621 - DNA, 19 bp, Artificial Sequence
  Synthetic
tggcagggcgcccgcgcag

SEQ ID NO: 622 - DNA, 19 bp, Artificial Sequence
  Synthetic
ggcagggcgcccgcgcagg

SEQ ID NO: 623 - DNA, 19 bp, Artificial Sequence
  Synthetic
gcagggcgcccgcgcaggc

SEQ ID NO: 624 - DNA, 19 bp, Artificial Sequence
  Synthetic
cagggcgcccgcgcaggca

SEQ ID NO: 625 - DNA, 19 bp, Artificial Sequence
  Synthetic
agggcgcccgcgcaggcag

SEQ ID NO: 626 - DNA, 19 bp, Artificial Sequence
  Synthetic
gggcgcccgcgcaggcagg

SEQ ID NO: 627 - DNA, 19 bp, Artificial Sequence
  Synthetic
ggcgcccgcgcaggcaggc

SEQ ID NO: 628 - DNA, 19 bp, Artificial Sequence
  Synthetic
gcgcccgcgcaggcaggcg

SEQ ID NO: 629 - DNA, 19 bp, Artificial Sequence
  Synthetic
cgcccgcgcaggcaggcgg

SEQ ID NO: 630 - DNA, 19 bp, Artificial Sequence
  Synthetic
gcccgcgcaggcaggcggc

SEQ ID NO: 631 - DNA, 19 bp, Artificial Sequence
  Synthetic
cccgcgcaggcaggcggcc

SEQ ID NO: 632 - DNA, 19 bp, Artificial Sequence
  Synthetic
ccgcgcaggcaggcggcct

SEQ ID NO: 633 - DNA, 19 bp, Artificial Sequence
  Synthetic
cgcgcaggcaggcggcctg

SEQ ID NO: 634 - DNA, 19 bp, Artificial Sequence
  Synthetic
gcgcaggcaggcggcctgt

SEQ ID NO: 635 - DNA, 19 bp, Artificial Sequence
  Synthetic
cgcaggcaggcggcctgtg

SEQ ID NO: 636 - DNA, 19 bp, Artificial Sequence
  Synthetic
gcaggcaggcggcctgtgc

SEQ ID NO: 637 - DNA, 19 bp, Artificial Sequence
  Synthetic
caggcaggcggcctgtgca

SEQ ID NO: 638 - DNA, 19 bp, Artificial Sequence
  Synthetic
aggcaggcggcctgtgcag

SEQ ID NO: 639 - DNA, 19 bp, Artificial Sequence
  Synthetic
ggcaggcggcctgtgcagc

SEQ ID NO: 640 - DNA, 19 bp, Artificial Sequence
  Synthetic
gcaggcggcctgtgcagcg

SEQ ID NO: 641 - DNA, 19 bp, Artificial Sequence
  Synthetic
caggcggcctgtgcagcgc

SEQ ID NO: 642 - DNA, 19 bp, Artificial Sequence
  Synthetic
aggcggcctgtgcagcgcg

SEQ ID NO: 643 - DNA, 19 bp, Artificial Sequence
  Synthetic
ggcggcctgtgcagcgcgg

SEQ ID NO: 644 - DNA, 19 bp, Artificial Sequence
  Synthetic
gcggcctgtgcagcgcggc

SEQ ID NO: 645 - DNA, 19 bp, Artificial Sequence
  Synthetic
cggcctgtgcagcgcggcc

SEQ ID NO: 646 - DNA, 19 bp, Artificial Sequence
  Synthetic
ggcctgtgcagcgcggccc

SEQ ID NO: 647 - DNA, 19 bp, Artificial Sequence
  Synthetic
gcctgtgcagcgcggcccc

SEQ ID NO: 648 - DNA, 19 bp, Artificial Sequence
  Synthetic
cctgtgcagcgcggccccc

SEQ ID NO: 649 - DNA, 19 bp, Artificial Sequence
  Synthetic
ctgtgcagcgcggcccccg

SEQ ID NO: 650 - DNA, 19 bp, Artificial Sequence
  Synthetic
tgtgcagcgcggcccccgg

SEQ ID NO: 651 - DNA, 19 bp, Artificial Sequence
  Synthetic
gtgcagcgcggcccccggc

SEQ ID NO: 652 - DNA, 19 bp, Artificial Sequence
  Synthetic
tgcagcgcggcccccggcg

SEQ ID NO: 653 - DNA, 19 bp, Artificial Sequence
  Synthetic
gcagcgcggcccccggcgg

SEQ ID NO: 654 - DNA, 19 bp, Artificial Sequence
  Synthetic
cagcgcggcccccggcggg

SEQ ID NO: 655 - DNA, 19 bp, Artificial Sequence
  Synthetic
agcgcggcccccggcgggg

SEQ ID NO: 656 - DNA, 19 bp, Artificial Sequence
  Synthetic
gcgcggcccccggcggggg

SEQ ID NO: 657 - DNA, 19 bp, Artificial Sequence
  Synthetic
cgcggcccccggcgggggt

SEQ ID NO: 658 - DNA, 19 bp, Artificial Sequence
  Synthetic
gcggcccccggcgggggtc

SEQ ID NO: 659 - DNA, 19 bp, Artificial Sequence
  Synthetic
cggcccccggcgggggtca

SEQ ID NO: 660 - DNA, 19 bp, Artificial Sequence
  Synthetic
ggcccccggcgggggtcac

SEQ ID NO: 661 - DNA, 19 bp, Artificial Sequence
  Synthetic
gcccccggcgggggtcacc

SEQ ID NO: 662 - DNA, 19 bp, Artificial Sequence
  Synthetic
cccccggcgggggtcaccc

SEQ ID NO: 663 - DNA, 19 bp, Artificial Sequence
  Synthetic
ccccggcgggggtcaccct

SEQ ID NO: 664 - DNA, 19 bp, Artificial Sequence
  Synthetic
cccggcgggggtcaccctg

SEQ ID NO: 665 - DNA, 19 bp, Artificial Sequence
  Synthetic
ccggcgggggtcaccctgc

SEQ ID NO: 666 - DNA, 19 bp, Artificial Sequence
  Synthetic
cggcgggggtcaccctgct

SEQ ID NO: 667 - DNA, 19 bp, Artificial Sequence
  Synthetic
ggcgggggtcaccctgctc

SEQ ID NO: 668 - DNA, 19 bp, Artificial Sequence
  Synthetic
gcgggggtcaccctgctcc

SEQ ID NO: 669 - DNA, 19 bp, Artificial Sequence
  Synthetic
cgggggtcaccctgctccc

SEQ ID NO: 670 - DNA, 19 bp, Artificial Sequence
  Synthetic
gggggtcaccctgctccct

SEQ ID NO: 671 - DNA, 19 bp, Artificial Sequence
  Synthetic
ggggtcaccctgctccctc

SEQ ID NO: 672 - DNA, 19 bp, Artificial Sequence
  Synthetic
gggtcaccctgctccctcg

SEQ ID NO: 673 - DNA, 19 bp, Artificial Sequence
  Synthetic
ggtcaccctgctccctcgt

SEQ ID NO: 674 - DNA, 19 bp, Artificial Sequence
  Synthetic
gtcaccctgctccctcgtg

SEQ ID NO: 675 - DNA, 19 bp, Artificial Sequence
  Synthetic
tcaccctgctccctcgtgg

SEQ ID NO: 676 - DNA, 19 bp, Artificial Sequence
  Synthetic
caccctgctccctcgtggg

SEQ ID NO: 677 - DNA, 19 bp, Artificial Sequence
  Synthetic
accctgctccctcgtgggt

SEQ ID NO: 678 - DNA, 19 bp, Artificial Sequence
  Synthetic
ccctgctccctcgtgggtc

SEQ ID NO: 679 - DNA, 19 bp, Artificial Sequence
  Synthetic
cctgctccctcgtgggtcg

SEQ ID NO: 680 - DNA, 19 bp, Artificial Sequence
  Synthetic
ctgctccctcgtgggtcgc

SEQ ID NO: 681 - DNA, 19 bp, Artificial Sequence
  Synthetic
tgctccctcgtgggtcgcc

SEQ ID NO: 682 - DNA, 19 bp, Artificial Sequence
  Synthetic
gctccctcgtgggtcgcct

SEQ ID NO: 683 - DNA, 19 bp, Artificial Sequence
  Synthetic
ctccctcgtgggtcgcctt

SEQ ID NO: 684 - DNA, 19 bp, Artificial Sequence
  Synthetic
tccctcgtgggtcgccttc

SEQ ID NO: 685 - DNA, 19 bp, Artificial Sequence
  Synthetic
ccctcgtgggtcgccttcg

SEQ ID NO: 686 - DNA, 19 bp, Artificial Sequence
  Synthetic
cctcgtgggtcgccttcgc

SEQ ID NO: 687 - DNA, 19 bp, Artificial Sequence
  Synthetic
ctcgtgggtcgccttcgcc

SEQ ID NO: 688 - DNA, 19 bp, Artificial Sequence
  Synthetic
tcgtgggtcgccttcgccc

SEQ ID NO: 689 - DNA, 19 bp, Artificial Sequence
  Synthetic
cgtgggtcgccttcgccca

SEQ ID NO: 690 - DNA, 19 bp, Artificial Sequence
  Synthetic
gtgggtcgccttcgcccac

SEQ ID NO: 691 - DNA, 19 bp, Artificial Sequence
  Synthetic
tgggtcgccttcgcccaca

SEQ ID NO: 692 - DNA, 19 bp, Artificial Sequence
  Synthetic
gggtcgccttcgcccacac

SEQ ID NO: 693 - DNA, 19 bp, Artificial Sequence
  Synthetic
ggtcgccttcgcccacacc

SEQ ID NO: 694 - DNA, 19 bp, Artificial Sequence
  Synthetic
gtcgccttcgcccacaccg

SEQ ID NO: 695 - DNA, 19 bp, Artificial Sequence
  Synthetic
tcgccttcgcccacaccgg

SEQ ID NO: 696 - DNA, 19 bp, Artificial Sequence
  Synthetic
cgccttcgcccacaccggc

SEQ ID NO: 697 - DNA, 19 bp, Artificial Sequence
  Synthetic
gccttcgcccacaccggcg

SEQ ID NO: 698 - DNA, 19 bp, Artificial Sequence
  Synthetic
ccttcgcccacaccggcgc

SEQ ID NO: 699 - DNA, 19 bp, Artificial Sequence
  Synthetic
cttcgcccacaccggcgcg

SEQ ID NO: 700 - DNA, 19 bp, Artificial Sequence
  Synthetic
ttcgcccacaccggcgcgt

SEQ ID NO: 701 - DNA, 19 bp, Artificial Sequence
  Synthetic
tcgcccacaccggcgcgtg

SEQ ID NO: 702 - DNA, 19 bp, Artificial Sequence
  Synthetic
cgcccacaccggcgcgtgg

SEQ ID NO: 703 - DNA, 19 bp, Artificial Sequence
  Synthetic
gcccacaccggcgcgtggg

SEQ ID NO: 704 - DNA, 19 bp, Artificial Sequence
  Synthetic
cccacaccggcgcgtgggg

SEQ ID NO: 705 - DNA, 19 bp, Artificial Sequence
  Synthetic
ccacaccggcgcgtgggga

SEQ ID NO: 706 - DNA, 19 bp, Artificial Sequence
  Synthetic
cacaccggcgcgtggggaa

SEQ ID NO: 707 - DNA, 19 bp, Artificial Sequence
  Synthetic
acaccggcgcgtggggaac

SEQ ID NO: 708 - DNA, 19 bp, Artificial Sequence
  Synthetic
caccggcgcgtggggaacg

SEQ ID NO: 709 - DNA, 19 bp, Artificial Sequence
  Synthetic
accggcgcgtggggaacgg

SEQ ID NO: 710 - DNA, 19 bp, Artificial Sequence
  Synthetic
ccggcgcgtggggaacggg

SEQ ID NO: 711 - DNA, 19 bp, Artificial Sequence
  Synthetic
cggcgcgtggggaacgggg

SEQ ID NO: 712 - DNA, 19 bp, Artificial Sequence
  Synthetic
ggcgcgtggggaacggggc

SEQ ID NO: 713 - DNA, 19 bp, Artificial Sequence
  Synthetic
gcgcgtggggaacggggct

SEQ ID NO: 714 - DNA, 19 bp, Artificial Sequence
  Synthetic
cgcgtggggaacggggctt

SEQ ID NO: 715 - DNA, 19 bp, Artificial Sequence
  Synthetic
gcgtggggaacggggcttc

SEQ ID NO: 716 - DNA, 19 bp, Artificial Sequence
  Synthetic
cgtggggaacggggcttcc

SEQ ID NO: 717 - DNA, 19 bp, Artificial Sequence
  Synthetic
gtggggaacggggcttccc

SEQ ID NO: 718 - DNA, 19 bp, Artificial Sequence
  Synthetic
tggggaacggggcttcccg

SEQ ID NO: 719 - DNA, 19 bp, Artificial Sequence
  Synthetic
ggggaacggggcttcccgc

SEQ ID NO: 720 - DNA, 19 bp, Artificial Sequence
  Synthetic
gggaacggggcttcccgca

SEQ ID NO: 721 - DNA, 19 bp, Artificial Sequence
  Synthetic
ggaacggggcttcccgcac

SEQ ID NO: 722 - DNA, 19 bp, Artificial Sequence
  Synthetic
gaacggggcttcccgcacc

SEQ ID NO: 723 - DNA, 19 bp, Artificial Sequence
  Synthetic
aacggggcttcccgcaccc

SEQ ID NO: 724 - DNA, 19 bp, Artificial Sequence
  Synthetic
acggggcttcccgcacccc

SEQ ID NO: 725 - DNA, 19 bp, Artificial Sequence
  Synthetic
cggggcttcccgcacccca

SEQ ID NO: 726 - DNA, 19 bp, Artificial Sequence
  Synthetic
ggggcttcccgcaccccac

SEQ ID NO: 727 - DNA, 19 bp, Artificial Sequence
  Synthetic
gggcttcccgcaccccacg

SEQ ID NO: 728 - DNA, 19 bp, Artificial Sequence
  Synthetic
ggcttcccgcaccccacgt

SEQ ID NO: 729 - DNA, 19 bp, Artificial Sequence
  Synthetic
gcttcccgcaccccacgtg

SEQ ID NO: 730 - DNA, 19 bp, Artificial Sequence
  Synthetic
cttcccgcaccccacgtgc

SEQ ID NO: 731 - DNA, 19 bp, Artificial Sequence
  Synthetic
ttcccgcaccccacgtgcc

SEQ ID NO: 732 - DNA, 19 bp, Artificial Sequence
  Synthetic
tcccgcaccccacgtgccc

SEQ ID NO: 733 - DNA, 19 bp, Artificial Sequence
  Synthetic
cccgcaccccacgtgccct

SEQ ID NO: 734 - DNA, 19 bp, Artificial Sequence
  Synthetic
ccgcaccccacgtgccctg

SEQ ID NO: 735 - DNA, 19 bp, Artificial Sequence
  Synthetic
cgcaccccacgtgccctgc

SEQ ID NO: 736 - DNA, 19 bp, Artificial Sequence
  Synthetic
gcaccccacgtgccctgcg

SEQ ID NO: 737 - DNA, 19 bp, Artificial Sequence
  Synthetic
caccccacgtgccctgcgc

SEQ ID NO: 738 - DNA, 19 bp, Artificial Sequence
  Synthetic
accccacgtgccctgcgcg

SEQ ID NO: 739 - DNA, 19 bp, Artificial Sequence
  Synthetic
ccccacgtgccctgcgcgc

SEQ ID NO: 740 - DNA, 19 bp, Artificial Sequence
  Synthetic
cccacgtgccctgcgcgcc

SEQ ID NO: 741 - DNA, 19 bp, Artificial Sequence
  Synthetic
ccacgtgccctgcgcgcct

SEQ ID NO: 742 - DNA, 19 bp, Artificial Sequence
  Synthetic
cacgtgccctgcgcgcctg

SEQ ID NO: 743 - DNA, 19 bp, Artificial Sequence
  Synthetic
acgtgccctgcgcgcctgg

SEQ ID NO: 744 - DNA, 19 bp, Artificial Sequence
  Synthetic
cgtgccctgcgcgcctggg

SEQ ID NO: 745 - DNA, 19 bp, Artificial Sequence
  Synthetic
gtgccctgcgcgcctgggg

SEQ ID NO: 746 - DNA, 19 bp, Artificial Sequence
  Synthetic
tgccctgcgcgcctggggc

SEQ ID NO: 747 - DNA, 19 bp, Artificial Sequence
  Synthetic
gccctgcgcgcctggggct

SEQ ID NO: 748 - DNA, 19 bp, Artificial Sequence
  Synthetic
ccctgcgcgcctggggctc

SEQ ID NO: 749 - DNA, 19 bp, Artificial Sequence
  Synthetic
cctgcgcgcctggggctct

SEQ ID NO: 750 - DNA, 19 bp, Artificial Sequence
  Synthetic
ctgcgcgcctggggctctc

SEQ ID NO: 751 - DNA, 19 bp, Artificial Sequence
  Synthetic
tgcgcgcctggggctctcc

SEQ ID NO: 752 - DNA, 19 bp, Artificial Sequence
  Synthetic
gcgcgcctggggctctccc

SEQ ID NO: 753 - DNA, 19 bp, Artificial Sequence
  Synthetic
cgcgcctggggctctccca

SEQ ID NO: 754 - DNA, 19 bp, Artificial Sequence
  Synthetic
gcgcctggggctctcccac

SEQ ID NO: 755 - DNA, 19 bp, Artificial Sequence
  Synthetic
cgcctggggctctcccaca

SEQ ID NO: 756 - DNA, 19 bp, Artificial Sequence
  Synthetic
gcctggggctctcccacag

SEQ ID NO: 757 - DNA, 19 bp, Artificial Sequence
  Synthetic
cctggggctctcccacagg

SEQ ID NO: 758 - DNA, 19 bp, Artificial Sequence
  Synthetic
ctggggctctcccacaggg

SEQ ID NO: 759 - DNA, 19 bp, Artificial Sequence
  Synthetic
tggggctctcccacagggg

SEQ ID NO: 760 - DNA, 19 bp, Artificial Sequence
  Synthetic
ggggctctcccacaggggg

SEQ ID NO: 761 - DNA, 19 bp, Artificial Sequence
  Synthetic
gggctctcccacagggggc

SEQ ID NO: 762 - DNA, 19 bp, Artificial Sequence
  Synthetic
ggctctcccacagggggct

SEQ ID NO: 763 - DNA, 19 bp, Artificial Sequence
  Synthetic
gctctcccacagggggctt

SEQ ID NO: 764 - DNA, 19 bp, Artificial Sequence
  Synthetic
ctctcccacagggggcttt

SEQ ID NO: 765 - DNA, 19 bp, Artificial Sequence
  Synthetic
tctcccacagggggctttc

SEQ ID NO: 766 - DNA, 19 bp, Artificial Sequence
  Synthetic
ctcccacagggggctttcg

SEQ ID NO: 767 - DNA, 19 bp, Artificial Sequence
  Synthetic
tcccacagggggctttcgt

SEQ ID NO: 768 - DNA, 19 bp, Artificial Sequence
  Synthetic
cccacagggggctttcgtg

SEQ ID NO: 769 - DNA, 19 bp, Artificial Sequence
  Synthetic
ccacagggggctttcgtga

SEQ ID NO: 770 - DNA, 19 bp, Artificial Sequence
  Synthetic
cacagggggctttcgtgag

SEQ ID NO: 771 - DNA, 19 bp, Artificial Sequence
  Synthetic
acagggggctttcgtgagc

SEQ ID NO: 772 - DNA, 19 bp, Artificial Sequence
  Synthetic
cagggggctttcgtgagcc

SEQ ID NO: 773 - DNA, 19 bp, Artificial Sequence
  Synthetic
agggggctttcgtgagcca

SEQ ID NO: 774 - DNA, 19 bp, Artificial Sequence
  Synthetic
gggggctttcgtgagccag

SEQ ID NO: 775 - DNA, 19 bp, Artificial Sequence
  Synthetic
ggggctttcgtgagccagg

SEQ ID NO: 776 - DNA, 19 bp, Artificial Sequence
  Synthetic
gggctttcgtgagccaggc

SEQ ID NO: 777 - DNA, 19 bp, Artificial Sequence
  Synthetic
ggctttcgtgagccaggca

SEQ ID NO: 778 - DNA, 19 bp, Artificial Sequence
  Synthetic
gctttcgtgagccaggcag

SEQ ID NO: 779 - DNA, 19 bp, Artificial Sequence
  Synthetic
ctttcgtgagccaggcagc

SEQ ID NO: 780 - DNA, 19 bp, Artificial Sequence
  Synthetic
tttcgtgagccaggcagcg

SEQ ID NO: 781 - DNA, 19 bp, Artificial Sequence
  Synthetic
ttcgtgagccaggcagcga

SEQ ID NO: 782 - DNA, 19 bp, Artificial Sequence
  Synthetic
tcgtgagccaggcagcgag

SEQ ID NO: 783 - DNA, 19 bp, Artificial Sequence
  Synthetic
cgtgagccaggcagcgagg

SEQ ID NO: 784 - DNA, 19 bp, Artificial Sequence
  Synthetic
gtgagccaggcagcgaggg

SEQ ID NO: 785 - DNA, 19 bp, Artificial Sequence
  Synthetic
tgagccaggcagcgagggc

SEQ ID NO: 786 - DNA, 19 bp, Artificial Sequence
  Synthetic
gagccaggcagcgagggcc

SEQ ID NO: 787 - DNA, 19 bp, Artificial Sequence
  Synthetic
agccaggcagcgagggccg

SEQ ID NO: 788 - DNA, 19 bp, Artificial Sequence
  Synthetic
gccaggcagcgagggccgc

SEQ ID NO: 789 - DNA, 19 bp, Artificial Sequence
  Synthetic
ccaggcagcgagggccgcc

SEQ ID NO: 790 - DNA, 19 bp, Artificial Sequence
  Synthetic
caggcagcgagggccgccc

SEQ ID NO: 791 - DNA, 19 bp, Artificial Sequence
  Synthetic
aggcagcgagggccgcccc

SEQ ID NO: 792 - DNA, 19 bp, Artificial Sequence
  Synthetic
ggcagcgagggccgccccc

SEQ ID NO: 793 - DNA, 19 bp, Artificial Sequence
  Synthetic
gcagcgagggccgcccccg

SEQ ID NO: 794 - DNA, 19 bp, Artificial Sequence
  Synthetic
cagcgagggccgcccccgc

SEQ ID NO: 795 - DNA, 19 bp, Artificial Sequence
  Synthetic
agcgagggccgcccccgcg

SEQ ID NO: 796 - DNA, 19 bp, Artificial Sequence
  Synthetic
gcgagggccgcccccgcgc

SEQ ID NO: 797 - DNA, 19 bp, Artificial Sequence
  Synthetic
cgagggccgcccccgcgct

SEQ ID NO: 798 - DNA, 19 bp, Artificial Sequence
  Synthetic
gagggccgcccccgcgctg

SEQ ID NO: 799 - DNA, 19 bp, Artificial Sequence
  Synthetic
agggccgcccccgcgctgc

SEQ ID NO: 800 - DNA, 19 bp, Artificial Sequence
  Synthetic
gggccgcccccgcgctgca

SEQ ID NO: 801 - DNA, 19 bp, Artificial Sequence
  Synthetic
ggccgcccccgcgctgcag

SEQ ID NO: 802 - DNA, 19 bp, Artificial Sequence
  Synthetic
gccgcccccgcgctgcagc

SEQ ID NO: 803 - DNA, 19 bp, Artificial Sequence
  Synthetic
ccgcccccgcgctgcagcc

SEQ ID NO: 804 - DNA, 19 bp, Artificial Sequence
  Synthetic
cgcccccgcgctgcagccc

SEQ ID NO: 805 - DNA, 19 bp, Artificial Sequence
  Synthetic
gcccccgcgctgcagccca

SEQ ID NO: 806 - DNA, 19 bp, Artificial Sequence
  Synthetic
cccccgcgctgcagcccag

SEQ ID NO: 807 - DNA, 19 bp, Artificial Sequence
  Synthetic
ccccgcgctgcagcccagc

SEQ ID NO: 808 - DNA, 19 bp, Artificial Sequence
  Synthetic
cccgcgctgcagcccagcc

SEQ ID NO: 809 - DNA, 19 bp, Artificial Sequence
  Synthetic
ccgcgctgcagcccagcca

SEQ ID NO: 810 - DNA, 19 bp, Artificial Sequence
  Synthetic
cgcgctgcagcccagccag

SEQ ID NO: 811 - DNA, 19 bp, Artificial Sequence
  Synthetic
gcgctgcagcccagccagg

SEQ ID NO: 812 - DNA, 19 bp, Artificial Sequence
  Synthetic
cgctgcagcccagccaggc

SEQ ID NO: 813 - DNA, 19 bp, Artificial Sequence
  Synthetic
gctgcagcccagccaggcc

SEQ ID NO: 814 - DNA, 19 bp, Artificial Sequence
  Synthetic
ctgcagcccagccaggccg

SEQ ID NO: 815 - DNA, 19 bp, Artificial Sequence
  Synthetic
tgcagcccagccaggccgc

SEQ ID NO: 816 - DNA, 19 bp, Artificial Sequence
  Synthetic
gcagcccagccaggccgcg

SEQ ID NO: 817 - DNA, 19 bp, Artificial Sequence
  Synthetic
cagcccagccaggccgcgc

SEQ ID NO: 818 - DNA, 19 bp, Artificial Sequence
  Synthetic
agcccagccaggccgcgcc

SEQ ID NO: 819 - DNA, 19 bp, Artificial Sequence
  Synthetic
gcccagccaggccgcgccg

SEQ ID NO: 820 - DNA, 19 bp, Artificial Sequence
  Synthetic
cccagccaggccgcgccgg

SEQ ID NO: 821 - DNA, 19 bp, Artificial Sequence
  Synthetic
ccagccaggccgcgccggc

SEQ ID NO: 822 - DNA, 19 bp, Artificial Sequence
  Synthetic
cagccaggccgcgccggca

SEQ ID NO: 823 - DNA, 19 bp, Artificial Sequence
  Synthetic
agccaggccgcgccggcag

SEQ ID NO: 824 - DNA, 19 bp, Artificial Sequence
  Synthetic
gccaggccgcgccggcaga

SEQ ID NO: 825 - DNA, 19 bp, Artificial Sequence
  Synthetic
ccaggccgcgccggcagag

SEQ ID NO: 826 - DNA, 19 bp, Artificial Sequence
  Synthetic
caggccgcgccggcagagg

SEQ ID NO: 827 - DNA, 19 bp, Artificial Sequence
  Synthetic
aggccgcgccggcagaggg

SEQ ID NO: 828 - DNA, 19 bp, Artificial Sequence
  Synthetic
ggccgcgccggcagagggg

SEQ ID NO: 829 - DNA, 19 bp, Artificial Sequence
  Synthetic
gccgcgccggcagagggga

SEQ ID NO: 830 - DNA, 19 bp, Artificial Sequence
  Synthetic
ccgcgccggcagaggggat

SEQ ID NO: 831 - DNA, 19 bp, Artificial Sequence
  Synthetic
cgcgccggcagaggggatc

SEQ ID NO: 832 - DNA, 19 bp, Artificial Sequence
  Synthetic
gcgccggcagaggggatct

SEQ ID NO: 833 - DNA, 19 bp, Artificial Sequence
  Synthetic
cgccggcagaggggatctc

SEQ ID NO: 834 - DNA, 19 bp, Artificial Sequence
  Synthetic
gccggcagaggggatctcc

SEQ ID NO: 835 - DNA, 19 bp, Artificial Sequence
  Synthetic
ccggcagaggggatctccc

SEQ ID NO: 836 - DNA, 19 bp, Artificial Sequence
  Synthetic
cggcagaggggatctccca

SEQ ID NO: 837 - DNA, 19 bp, Artificial Sequence
  Synthetic
ggcagaggggatctcccaa

SEQ ID NO: 838 - DNA, 19 bp, Artificial Sequence
  Synthetic
gcagaggggatctcccaac

SEQ ID NO: 839 - DNA, 19 bp, Artificial Sequence
  Synthetic
cagaggggatctcccaacc

SEQ ID NO: 840 - DNA, 19 bp, Artificial Sequence
  Synthetic
agaggggatctcccaacct

SEQ ID NO: 841 - DNA, 19 bp, Artificial Sequence
  Synthetic
gaggggatctcccaacctg

SEQ ID NO: 842 - DNA, 19 bp, Artificial Sequence
  Synthetic
aggggatctcccaacctgc

SEQ ID NO: 843 - DNA, 19 bp, Artificial Sequence
  Synthetic
ggggatctcccaacctgcc

SEQ ID NO: 844 - DNA, 19 bp, Artificial Sequence
  Synthetic
gggatctcccaacctgccc

SEQ ID NO: 845 - DNA, 19 bp, Artificial Sequence
  Synthetic
ggatctcccaacctgcccc

SEQ ID NO: 846 - DNA, 19 bp, Artificial Sequence
  Synthetic
gatctcccaacctgccccg

SEQ ID NO: 847 - DNA, 19 bp, Artificial Sequence
  Synthetic
atctcccaacctgccccgg

SEQ ID NO: 848 - DNA, 19 bp, Artificial Sequence
  Synthetic
tctcccaacctgccccggc

SEQ ID NO: 849 - DNA, 19 bp, Artificial Sequence
  Synthetic
ctcccaacctgccccggcg

SEQ ID NO: 850 - DNA, 19 bp, Artificial Sequence
  Synthetic
tcccaacctgccccggcgc

SEQ ID NO: 851 - DNA, 19 bp, Artificial Sequence
  Synthetic
cccaacctgccccggcgcg

SEQ ID NO: 852 - DNA, 19 bp, Artificial Sequence
  Synthetic
ccaacctgccccggcgcgc

SEQ ID NO: 853 - DNA, 19 bp, Artificial Sequence
  Synthetic
caacctgccccggcgcgcg

SEQ ID NO: 854 - DNA, 19 bp, Artificial Sequence
  Synthetic
aacctgccccggcgcgcgg

SEQ ID NO: 855 - DNA, 19 bp, Artificial Sequence
  Synthetic
acctgccccggcgcgcggg

SEQ ID NO: 856 - DNA, 19 bp, Artificial Sequence
  Synthetic
cctgccccggcgcgcgggg

SEQ ID NO: 857 - DNA, 19 bp, Artificial Sequence
  Synthetic
ctgccccggcgcgcgggga

SEQ ID NO: 858 - DNA, 19 bp, Artificial Sequence
  Synthetic
tgccccggcgcgcggggat

SEQ ID NO: 859 - DNA, 19 bp, Artificial Sequence
  Synthetic
gccccggcgcgcggggatt

SEQ ID NO: 860 - DNA, 19 bp, Artificial Sequence
  Synthetic
ccccggcgcgcggggattt

SEQ ID NO: 861 - DNA, 19 bp, Artificial Sequence
  Synthetic
cccggcgcgcggggatttc

SEQ ID NO: 862 - DNA, 19 bp, Artificial Sequence
  Synthetic
ccggcgcgcggggatttcg

SEQ ID NO: 863 - DNA, 19 bp, Artificial Sequence
  Synthetic
cggcgcgcggggatttcgc

SEQ ID NO: 864 - DNA, 19 bp, Artificial Sequence
  Synthetic
ggcgcgcggggatttcgcc

SEQ ID NO: 865 - DNA, 19 bp, Artificial Sequence
  Synthetic
gcgcgcggggatttcgcct

SEQ ID NO: 866 - DNA, 19 bp, Artificial Sequence
  Synthetic
cgcgcggggatttcgccta

SEQ ID NO: 867 - DNA, 19 bp, Artificial Sequence
  Synthetic
gcgcggggatttcgcctac

SEQ ID NO: 868 - DNA, 19 bp, Artificial Sequence
  Synthetic
cgcggggatttcgcctacg

SEQ ID NO: 869 - DNA, 19 bp, Artificial Sequence
  Synthetic
gcggggatttcgcctacgc

SEQ ID NO: 870 - DNA, 19 bp, Artificial Sequence
  Synthetic
cggggatttcgcctacgcc

SEQ ID NO: 871 - DNA, 19 bp, Artificial Sequence
  Synthetic
ggggatttcgcctacgccg

SEQ ID NO: 872 - DNA, 19 bp, Artificial Sequence
  Synthetic
gggatttcgcctacgccgc

SEQ ID NO: 873 - DNA, 19 bp, Artificial Sequence
  Synthetic
ggatttcgcctacgccgcc

SEQ ID NO: 874 - DNA, 19 bp, Artificial Sequence
  Synthetic
gatttcgcctacgccgccc

SEQ ID NO: 875 - DNA, 19 bp, Artificial Sequence
  Synthetic
atttcgcctacgccgcccc

SEQ ID NO: 876 - DNA, 19 bp, Artificial Sequence
  Synthetic
tttcgcctacgccgccccg

SEQ ID NO: 877 - DNA, 19 bp, Artificial Sequence
  Synthetic
ttcgcctacgccgccccgg

SEQ ID NO: 878 - DNA, 19 bp, Artificial Sequence
  Synthetic
tcgcctacgccgccccggc

SEQ ID NO: 879 - DNA, 19 bp, Artificial Sequence
  Synthetic
cgcctacgccgccccggct

SEQ ID NO: 880 - DNA, 19 bp, Artificial Sequence
  Synthetic
gcctacgccgccccggctc

SEQ ID NO: 881 - DNA, 19 bp, Artificial Sequence
  Synthetic
cctacgccgccccggctcc

SEQ ID NO: 882 - DNA, 19 bp, Artificial Sequence
  Synthetic
ctacgccgccccggctcct

SEQ ID NO: 883 - DNA, 19 bp, Artificial Sequence
  Synthetic
tacgccgccccggctcctc

SEQ ID NO: 884 - DNA, 19 bp, Artificial Sequence
  Synthetic
acgccgccccggctcctcc

SEQ ID NO: 885 - DNA, 19 bp, Artificial Sequence
  Synthetic
cgccgccccggctcctccg

SEQ ID NO: 886 - DNA, 19 bp, Artificial Sequence
  Synthetic
gccgccccggctcctccgg

SEQ ID NO: 887 - DNA, 19 bp, Artificial Sequence
  Synthetic
ccgccccggctcctccgga

SEQ ID NO: 888 - DNA, 19 bp, Artificial Sequence
  Synthetic
cgccccggctcctccggac

SEQ ID NO: 889 - DNA, 19 bp, Artificial Sequence
  Synthetic
gccccggctcctccggacg

SEQ ID NO: 890 - DNA, 19 bp, Artificial Sequence
  Synthetic
ccccggctcctccggacgg

SEQ ID NO: 891 - DNA, 19 bp, Artificial Sequence
  Synthetic
cccggctcctccggacggg

SEQ ID NO: 892 - DNA, 19 bp, Artificial Sequence
  Synthetic
ccggctcctccggacgggg

SEQ ID NO: 893 - DNA, 19 bp, Artificial Sequence
  Synthetic
cggctcctccggacggggc

SEQ ID NO: 894 - DNA, 19 bp, Artificial Sequence
  Synthetic
ggctcctccggacggggcg

SEQ ID NO: 895 - DNA, 19 bp, Artificial Sequence
  Synthetic
gctcctccggacggggcgc

SEQ ID NO: 896 - DNA, 19 bp, Artificial Sequence
  Synthetic
ctcctccggacggggcgct

SEQ ID NO: 897 - DNA, 19 bp, Artificial Sequence
  Synthetic
tcctccggacggggcgctc

SEQ ID NO: 898 - DNA, 19 bp, Artificial Sequence
  Synthetic
cctccggacggggcgctct

SEQ ID NO: 899 - DNA, 19 bp, Artificial Sequence
  Synthetic
ctccggacggggcgctctc

SEQ ID NO: 900 - DNA, 19 bp, Artificial Sequence
  Synthetic
tccggacggggcgctctcc

SEQ ID NO: 901 - DNA, 19 bp, Artificial Sequence
  Synthetic
ccggacggggcgctctccc

SEQ ID NO: 902 - DNA, 19 bp, Artificial Sequence
  Synthetic
cggacggggcgctctccca

SEQ ID NO: 903 - DNA, 19 bp, Artificial Sequence
  Synthetic
ggacggggcgctctcccac

SEQ ID NO: 904 - DNA, 19 bp, Artificial Sequence
  Synthetic
gacggggcgctctcccacc

SEQ ID NO: 905 - DNA, 19 bp, Artificial Sequence
  Synthetic
acggggcgctctcccaccc

SEQ ID NO: 906 - DNA, 19 bp, Artificial Sequence
  Synthetic
cggggcgctctcccaccct

SEQ ID NO: 907 - DNA, 19 bp, Artificial Sequence
  Synthetic
ggggcgctctcccaccctc

SEQ ID NO: 908 - DNA, 19 bp, Artificial Sequence
  Synthetic
gggcgctctcccaccctca

SEQ ID NO: 909 - DNA, 19 bp, Artificial Sequence
  Synthetic
ggcgctctcccaccctcag

SEQ ID NO: 910 - DNA, 19 bp, Artificial Sequence
  Synthetic
gcgctctcccaccctcagg

SEQ ID NO: 911 - DNA, 19 bp, Artificial Sequence
  Synthetic
cgctctcccaccctcaggc

SEQ ID NO: 912 - DNA, 19 bp, Artificial Sequence
  Synthetic
gctctcccaccctcaggct

SEQ ID NO: 913 - DNA, 19 bp, Artificial Sequence
  Synthetic
ctctcccaccctcaggctc

SEQ ID NO: 914 - DNA, 19 bp, Artificial Sequence
  Synthetic
tctcccaccctcaggctcc

SEQ ID NO: 915 - DNA, 19 bp, Artificial Sequence
  Synthetic
ctcccaccctcaggctcct

SEQ ID NO: 916 - DNA, 19 bp, Artificial Sequence
  Synthetic
tcccaccctcaggctcctc

SEQ ID NO: 917 - DNA, 19 bp, Artificial Sequence
  Synthetic
cccaccctcaggctcctcg

SEQ ID NO: 918 - DNA, 19 bp, Artificial Sequence
  Synthetic
ccaccctcaggctcctcgc

SEQ ID NO: 919 - DNA, 19 bp, Artificial Sequence
  Synthetic
caccctcaggctcctcgct

SEQ ID NO: 920 - DNA, 19 bp, Artificial Sequence
  Synthetic
accctcaggctcctcgctg

SEQ ID NO: 921 - DNA, 19 bp, Artificial Sequence
  Synthetic
ccctcaggctcctcgctgg

SEQ ID NO: 922 - DNA, 19 bp, Artificial Sequence
  Synthetic
cctcaggctcctcgctggc

SEQ ID NO: 923 - DNA, 19 bp, Artificial Sequence
  Synthetic
ctcaggctcctcgctggcc

SEQ ID NO: 924 - DNA, 19 bp, Artificial Sequence
  Synthetic
tcaggctcctcgctggcct

SEQ ID NO: 925 - DNA, 19 bp, Artificial Sequence
  Synthetic
caggctcctcgctggcctc

SEQ ID NO: 926 - DNA, 19 bp, Artificial Sequence
  Synthetic
aggctcctcgctggcctcc

SEQ ID NO: 927 - DNA, 19 bp, Artificial Sequence
  Synthetic
ggctcctcgctggcctccg

SEQ ID NO: 928 - DNA, 19 bp, Artificial Sequence
  Synthetic
gctcctcgctggcctccgc

SEQ ID NO: 929 - DNA, 19 bp, Artificial Sequence
  Synthetic
ctcctcgctggcctccgca

SEQ ID NO: 930 - DNA, 19 bp, Artificial Sequence
  Synthetic
tcctcgctggcctccgcac

SEQ ID NO: 931 - DNA, 19 bp, Artificial Sequence
  Synthetic
cctcgctggcctccgcacc

SEQ ID NO: 932 - DNA, 19 bp, Artificial Sequence
  Synthetic
ctcgctggcctccgcaccc

SEQ ID NO: 933 - DNA, 19 bp, Artificial Sequence
  Synthetic
tcgctggcctccgcacccg

SEQ ID NO: 934 - DNA, 19 bp, Artificial Sequence
  Synthetic
cgctggcctccgcacccgg

SEQ ID NO: 935 - DNA, 19 bp, Artificial Sequence
  Synthetic
gctggcctccgcacccggg

SEQ ID NO: 936 - DNA, 19 bp, Artificial Sequence
  Synthetic
ctggcctccgcacccgggc

SEQ ID NO: 937 - DNA, 19 bp, Artificial Sequence
  Synthetic
tggcctccgcacccgggca

SEQ ID NO: 938 - DNA, 19 bp, Artificial Sequence
  Synthetic
ggcctccgcacccgggcaa

SEQ ID NO: 939 - DNA, 19 bp, Artificial Sequence
  Synthetic
gcctccgcacccgggcaaa

SEQ ID NO: 940 - DNA, 19 bp, Artificial Sequence
  Synthetic
cctccgcacccgggcaaaa

SEQ ID NO: 941 - DNA, 19 bp, Artificial Sequence
  Synthetic
ctccgcacccgggcaaaag

SEQ ID NO: 942 - DNA, 19 bp, Artificial Sequence
  Synthetic
tccgcacccgggcaaaagc

SEQ ID NO: 943 - DNA, 19 bp, Artificial Sequence
  Synthetic
ccgcacccgggcaaaagcc

SEQ ID NO: 944 - DNA, 19 bp, Artificial Sequence
  Synthetic
cgcacccgggcaaaagccg

SEQ ID NO: 945 - DNA, 19 bp, Artificial Sequence
  Synthetic
gcacccgggcaaaagccgg

SEQ ID NO: 946 - DNA, 19 bp, Artificial Sequence
  Synthetic
cacccgggcaaaagccggg

SEQ ID NO: 947 - DNA, 19 bp, Artificial Sequence
  Synthetic
acccgggcaaaagccggga

SEQ ID NO: 948 - DNA, 19 bp, Artificial Sequence
  Synthetic
cccgggcaaaagccgggag

SEQ ID NO: 949 - DNA, 19 bp, Artificial Sequence
  Synthetic
ccgggcaaaagccgggagg

SEQ ID NO: 950 - DNA, 19 bp, Artificial Sequence
  Synthetic
cgggcaaaagccgggagga

SEQ ID NO: 951 - DNA, 19 bp, Artificial Sequence
  Synthetic
gggcaaaagccgggaggac

SEQ ID NO: 952 - DNA, 19 bp, Artificial Sequence
  Synthetic
ggcaaaagccgggaggacc

SEQ ID NO: 953 - DNA, 19 bp, Artificial Sequence
  Synthetic
gcaaaagccgggaggaccg

SEQ ID NO: 954 - DNA, 19 bp, Artificial Sequence
  Synthetic
caaaagccgggaggaccgg

SEQ ID NO: 955 - DNA, 19 bp, Artificial Sequence
  Synthetic
aaaagccgggaggaccggg

SEQ ID NO: 956 - DNA, 19 bp, Artificial Sequence
  Synthetic
aaagccgggaggaccggga

SEQ ID NO: 957 - DNA, 19 bp, Artificial Sequence
  Synthetic
aagccgggaggaccgggac

SEQ ID NO: 958 - DNA, 19 bp, Artificial Sequence
  Synthetic
agccgggaggaccgggacc

SEQ ID NO: 959 - DNA, 19 bp, Artificial Sequence
  Synthetic
gccgggaggaccgggaccc

SEQ ID NO: 960 - DNA, 19 bp, Artificial Sequence
  Synthetic
ccgggaggaccgggacccg

SEQ ID NO: 961 - DNA, 19 bp, Artificial Sequence
  Synthetic
cgggaggaccgggacccgc

SEQ ID NO: 962 - DNA, 19 bp, Artificial Sequence
  Synthetic
gggaggaccgggacccgca

SEQ ID NO: 963 - DNA, 19 bp, Artificial Sequence
  Synthetic
ggaggaccgggacccgcag

SEQ ID NO: 964 - DNA, 19 bp, Artificial Sequence
  Synthetic
gaggaccgggacccgcagc

SEQ ID NO: 965 - DNA, 19 bp, Artificial Sequence
  Synthetic
aggaccgggacccgcagcg

SEQ ID NO: 966 - DNA, 19 bp, Artificial Sequence
  Synthetic
ggaccgggacccgcagcgc

SEQ ID NO: 967 - DNA, 19 bp, Artificial Sequence
  Synthetic
gaccgggacccgcagcgcg

SEQ ID NO: 968 - DNA, 19 bp, Artificial Sequence
  Synthetic
accgggacccgcagcgcga

SEQ ID NO: 969 - DNA, 19 bp, Artificial Sequence
  Synthetic
ccgggacccgcagcgcgac

SEQ ID NO: 970 - DNA, 19 bp, Artificial Sequence
  Synthetic
cgggacccgcagcgcgacg

SEQ ID NO: 971 - DNA, 19 bp, Artificial Sequence
  Synthetic
gggacccgcagcgcgacgg

SEQ ID NO: 972 - DNA, 19 bp, Artificial Sequence
  Synthetic
ggacccgcagcgcgacggc

SEQ ID NO: 973 - DNA, 19 bp, Artificial Sequence
  Synthetic
gacccgcagcgcgacggcc

SEQ ID NO: 974 - DNA, 19 bp, Artificial Sequence
  Synthetic
acccgcagcgcgacggcct

SEQ ID NO: 975 - DNA, 19 bp, Artificial Sequence
  Synthetic
cccgcagcgcgacggcctg

SEQ ID NO: 976 - DNA, 19 bp, Artificial Sequence
  Synthetic
ccgcagcgcgacggcctgc

SEQ ID NO: 977 - DNA, 19 bp, Artificial Sequence
  Synthetic
cgcagcgcgacggcctgcc

SEQ ID NO: 978 - DNA, 19 bp, Artificial Sequence
  Synthetic
gcagcgcgacggcctgccg

SEQ ID NO: 979 - DNA, 19 bp, Artificial Sequence
  Synthetic
cagcgcgacggcctgccgg

SEQ ID NO: 980 - DNA, 19 bp, Artificial Sequence
  Synthetic
agcgcgacggcctgccggg

SEQ ID NO: 981 - DNA, 19 bp, Artificial Sequence
  Synthetic
gcgcgacggcctgccgggc

SEQ ID NO: 982 - DNA, 19 bp, Artificial Sequence
  Synthetic
cgcgacggcctgccgggcc

SEQ ID NO: 983 - DNA, 19 bp, Artificial Sequence
  Synthetic
gcgacggcctgccgggccc

SEQ ID NO: 984 - DNA, 19 bp, Artificial Sequence
  Synthetic
cgacggcctgccgggcccc

SEQ ID NO: 985 - DNA, 19 bp, Artificial Sequence
  Synthetic
gacggcctgccgggcccct

SEQ ID NO: 986 - DNA, 19 bp, Artificial Sequence
  Synthetic
acggcctgccgggcccctg

SEQ ID NO: 987 - DNA, 19 bp, Artificial Sequence
  Synthetic
cggcctgccgggcccctgc

SEQ ID NO: 988 - DNA, 19 bp, Artificial Sequence
  Synthetic
ggcctgccgggcccctgcg

SEQ ID NO: 989 - DNA, 19 bp, Artificial Sequence
  Synthetic
gcctgccgggcccctgcgc

SEQ ID NO: 990 - DNA, 19 bp, Artificial Sequence
  Synthetic
cctgccgggcccctgcgcg

SEQ ID NO: 991 - DNA, 19 bp, Artificial Sequence
  Synthetic
ctgccgggcccctgcgcgg

SEQ ID NO: 992 - DNA, 19 bp, Artificial Sequence
  Synthetic
tgccgggcccctgcgcggt

SEQ ID NO: 993 - DNA, 19 bp, Artificial Sequence
  Synthetic
gccgggcccctgcgcggtg

SEQ ID NO: 994 - DNA, 19 bp, Artificial Sequence
  Synthetic
ccgggcccctgcgcggtgg

SEQ ID NO: 995 - DNA, 19 bp, Artificial Sequence
  Synthetic
cgggcccctgcgcggtggc

SEQ ID NO: 996 - DNA, 19 bp, Artificial Sequence
  Synthetic
gggcccctgcgcggtggca

SEQ ID NO: 997 - DNA, 19 bp, Artificial Sequence
  Synthetic
ggcccctgcgcggtggcac

SEQ ID NO: 998 - DNA, 19 bp, Artificial Sequence
  Synthetic
gcccctgcgcggtggcaca

SEQ ID NO: 999 - DNA, 19 bp, Artificial Sequence
  Synthetic
cccctgcgcggtggcacag

SEQ ID NO: 1000 - DNA, 19 bp, Artificial Sequence
  Synthetic
ccctgcgcggtggcacagc

SEQ ID NO: 1001 - DNA, 19 bp, Artificial Sequence
  Synthetic
cctgcgcggtggcacagcc

SEQ ID NO: 1002 - DNA, 19 bp, Artificial Sequence
  Synthetic
ctgcgcggtggcacagcct

SEQ ID NO: 1003 - DNA, 19 bp, Artificial Sequence
  Synthetic
tgcgcggtggcacagcctg

SEQ ID NO: 1004 - DNA, 19 bp, Artificial Sequence
  Synthetic
gcgcggtggcacagcctgg

SEQ ID NO: 1005 - DNA, 19 bp, Artificial Sequence
  Synthetic
cgcggtggcacagcctggg

SEQ ID NO: 1006 - DNA, 19 bp, Artificial Sequence
  Synthetic
gcggtggcacagcctgggc

SEQ ID NO: 1007 - DNA, 19 bp, Artificial Sequence
  Synthetic
cggtggcacagcctgggcc

SEQ ID NO: 1008 - DNA, 19 bp, Artificial Sequence
  Synthetic
ggtggcacagcctgggccc

SEQ ID NO: 1009 - DNA, 19 bp, Artificial Sequence
  Synthetic
gtggcacagcctgggcccg

SEQ ID NO: 1010 - DNA, 19 bp, Artificial Sequence
  Synthetic
tggcacagcctgggcccgc

SEQ ID NO: 1011 - DNA, 19 bp, Artificial Sequence
  Synthetic
ggcacagcctgggcccgct

SEQ ID NO: 1012 - DNA, 19 bp, Artificial Sequence
  Synthetic
gcacagcctgggcccgctc

SEQ ID NO: 1013 - DNA, 19 bp, Artificial Sequence
  Synthetic
cacagcctgggcccgctca

SEQ ID NO: 1014 - DNA, 19 bp, Artificial Sequence
  Synthetic
acagcctgggcccgctcaa

SEQ ID NO: 1015 - DNA, 19 bp, Artificial Sequence
  Synthetic
cagcctgggcccgctcaag

SEQ ID NO: 1016 - DNA, 19 bp, Artificial Sequence
  Synthetic
agcctgggcccgctcaagc

SEQ ID NO: 1017 - DNA, 19 bp, Artificial Sequence
  Synthetic
gcctgggcccgctcaagcg

SEQ ID NO: 1018 - DNA, 19 bp, Artificial Sequence
  Synthetic
cctgggcccgctcaagcgg

SEQ ID NO: 1019 - DNA, 19 bp, Artificial Sequence
  Synthetic
ctgggcccgctcaagcggg

SEQ ID NO: 1020 - DNA, 19 bp, Artificial Sequence
  Synthetic
tgggcccgctcaagcgggg

SEQ ID NO: 1021 - DNA, 19 bp, Artificial Sequence
  Synthetic
gggcccgctcaagcggggc

SEQ ID NO: 1022 - DNA, 19 bp, Artificial Sequence
  Synthetic
ggcccgctcaagcggggcc

SEQ ID NO: 1023 - DNA, 19 bp, Artificial Sequence
  Synthetic
gcccgctcaagcggggccg

SEQ ID NO: 1024 - DNA, 19 bp, Artificial Sequence
  Synthetic
cccgctcaagcggggccgc

SEQ ID NO: 1025 - DNA, 19 bp, Artificial Sequence
  Synthetic
ccgctcaagcggggccgca

SEQ ID NO: 1026 - DNA, 19 bp, Artificial Sequence
  Synthetic
cgctcaagcggggccgcag

SEQ ID NO: 1027 - DNA, 19 bp, Artificial Sequence
  Synthetic
gctcaagcggggccgcagg

SEQ ID NO: 1028 - DNA, 19 bp, Artificial Sequence
  Synthetic
ctcaagcggggccgcaggg

SEQ ID NO: 1029 - DNA, 19 bp, Artificial Sequence
  Synthetic
tcaagcggggccgcagggc

SEQ ID NO: 1030 - DNA, 19 bp, Artificial Sequence
  Synthetic
caagcggggccgcagggcc

SEQ ID NO: 1031 - DNA, 19 bp, Artificial Sequence
  Synthetic
aagcggggccgcagggcca

SEQ ID NO: 1032 - DNA, 19 bp, Artificial Sequence
  Synthetic
agcggggccgcagggccaa

SEQ ID NO: 1033 - DNA, 19 bp, Artificial Sequence
  Synthetic
gcggggccgcagggccaag

SEQ ID NO: 1034 - DNA, 19 bp, Artificial Sequence
  Synthetic
cggggccgcagggccaagg

SEQ ID NO: 1035 - DNA, 19 bp, Artificial Sequence
  Synthetic
ggggccgcagggccaaggg

SEQ ID NO: 1036 - DNA, 19 bp, Artificial Sequence
  Synthetic
gggccgcagggccaagggg

SEQ ID NO: 1037 - DNA, 19 bp, Artificial Sequence
  Synthetic
ggccgcagggccaaggggt

SEQ ID NO: 1038 - DNA, 19 bp, Artificial Sequence
  Synthetic
gccgcagggccaaggggtg

SEQ ID NO: 1039 - DNA, 19 bp, Artificial Sequence
  Synthetic
ccgcagggccaaggggtgc

SEQ ID NO: 1040 - DNA, 19 bp, Artificial Sequence
  Synthetic
cgcagggccaaggggtgct

SEQ ID NO: 1041 - DNA, 19 bp, Artificial Sequence
  Synthetic
gcagggccaaggggtgctt

SEQ ID NO: 1042 - DNA, 19 bp, Artificial Sequence
  Synthetic
cagggccaaggggtgcttg

SEQ ID NO: 1043 - DNA, 19 bp, Artificial Sequence
  Synthetic
agggccaaggggtgcttgc

SEQ ID NO: 1044 - DNA, 19 bp, Artificial Sequence
  Synthetic
gggccaaggggtgcttgcg

SEQ ID NO: 1045 - DNA, 19 bp, Artificial Sequence
  Synthetic
ggccaaggggtgcttgcgc

SEQ ID NO: 1046 - DNA, 19 bp, Artificial Sequence
  Synthetic
gccaaggggtgcttgcgcc

SEQ ID NO: 1047 - DNA, 19 bp, Artificial Sequence
  Synthetic
ccaaggggtgcttgcgcca

SEQ ID NO: 1048 - DNA, 19 bp, Artificial Sequence
  Synthetic
caaggggtgcttgcgccac

SEQ ID NO: 1049 - DNA, 19 bp, Artificial Sequence
  Synthetic
aaggggtgcttgcgccacc

SEQ ID NO: 1050 - DNA, 19 bp, Artificial Sequence
  Synthetic
aggggtgcttgcgccaccc

SEQ ID NO: 1051 - DNA, 19 bp, Artificial Sequence
  Synthetic
ggggtgcttgcgccaccca

SEQ ID NO: 1052 - DNA, 19 bp, Artificial Sequence
  Synthetic
gggtgcttgcgccacccac

SEQ ID NO: 1053 - DNA, 19 bp, Artificial Sequence
  Synthetic
ggtgcttgcgccacccacg

SEQ ID NO: 1054 - DNA, 19 bp, Artificial Sequence
  Synthetic
gtgcttgcgccacccacgt

SEQ ID NO: 1055 - DNA, 19 bp, Artificial Sequence
  Synthetic
tgcttgcgccacccacgtc

SEQ ID NO: 1056 - DNA, 19 bp, Artificial Sequence
  Synthetic
gcttgcgccacccacgtcc

SEQ ID NO: 1057 - DNA, 19 bp, Artificial Sequence
  Synthetic
cttgcgccacccacgtccc

SEQ ID NO: 1058 - DNA, 19 bp, Artificial Sequence
  Synthetic
ttgcgccacccacgtccca

SEQ ID NO: 1059 - DNA, 19 bp, Artificial Sequence
  Synthetic
tgcgccacccacgtcccag

SEQ ID NO: 1060 - DNA, 19 bp, Artificial Sequence
  Synthetic
gcgccacccacgtcccagg

SEQ ID NO: 1061 - DNA, 19 bp, Artificial Sequence
  Synthetic
cgccacccacgtcccaggg

SEQ ID NO: 1062 - DNA, 19 bp, Artificial Sequence
  Synthetic
gccacccacgtcccagggg

SEQ ID NO: 1063 - DNA, 19 bp, Artificial Sequence
  Synthetic
ccacccacgtcccagggga

SEQ ID NO: 1064 - DNA, 19 bp, Artificial Sequence
  Synthetic
cacccacgtcccaggggag

SEQ ID NO: 1065 - DNA, 19 bp, Artificial Sequence
  Synthetic
acccacgtcccaggggagt

SEQ ID NO: 1066 - DNA, 19 bp, Artificial Sequence
  Synthetic
cccacgtcccaggggagtc

SEQ ID NO: 1067 - DNA, 19 bp, Artificial Sequence
  Synthetic
ccacgtcccaggggagtcc

SEQ ID NO: 1068 - DNA, 19 bp, Artificial Sequence
  Synthetic
cacgtcccaggggagtccg

SEQ ID NO: 1069 - DNA, 19 bp, Artificial Sequence
  Synthetic
acgtcccaggggagtccgt

SEQ ID NO: 1070 - DNA, 19 bp, Artificial Sequence
  Synthetic
cgtcccaggggagtccgtg

SEQ ID NO: 1071 - DNA, 19 bp, Artificial Sequence
  Synthetic
gtcccaggggagtccgtgg

SEQ ID NO: 1072 - DNA, 19 bp, Artificial Sequence
  Synthetic
tcccaggggagtccgtggt

SEQ ID NO: 1073 - DNA, 19 bp, Artificial Sequence
  Synthetic
cccaggggagtccgtggtg

SEQ ID NO: 1074 - DNA, 19 bp, Artificial Sequence
  Synthetic
ccaggggagtccgtggtgg

SEQ ID NO: 1075 - DNA, 19 bp, Artificial Sequence
  Synthetic
caggggagtccgtggtggg

SEQ ID NO: 1076 - DNA, 19 bp, Artificial Sequence
  Synthetic
aggggagtccgtggtgggg

SEQ ID NO: 1077 - DNA, 19 bp, Artificial Sequence
  Synthetic
ggggagtccgtggtggggc

SEQ ID NO: 1078 - DNA, 19 bp, Artificial Sequence
  Synthetic
gggagtccgtggtggggct

SEQ ID NO: 1079 - DNA, 19 bp, Artificial Sequence
  Synthetic
ggagtccgtggtggggctg

SEQ ID NO: 1080 - DNA, 19 bp, Artificial Sequence
  Synthetic
gagtccgtggtggggctgg

SEQ ID NO: 1081 - DNA, 19 bp, Artificial Sequence
  Synthetic
agtccgtggtggggctggg

SEQ ID NO: 1082 - DNA, 19 bp, Artificial Sequence
  Synthetic
gtccgtggtggggctgggg

SEQ ID NO: 1083 - DNA, 19 bp, Artificial Sequence
  Synthetic
tccgtggtggggctggggc

SEQ ID NO: 1084 - DNA, 19 bp, Artificial Sequence
  Synthetic
ccgtggtggggctggggcc

SEQ ID NO: 1085 - DNA, 19 bp, Artificial Sequence
  Synthetic
cgtggtggggctggggccg

SEQ ID NO: 1086 - DNA, 19 bp, Artificial Sequence
  Synthetic
gtggtggggctggggccgg

SEQ ID NO: 1087 - DNA, 19 bp, Artificial Sequence
  Synthetic
tggtggggctggggccggg

SEQ ID NO: 1088 - DNA, 19 bp, Artificial Sequence
  Synthetic
ggtggggctggggccgggg

SEQ ID NO: 1089 - DNA, 19 bp, Artificial Sequence
  Synthetic
gtggggctggggccggggt

SEQ ID NO: 1090 - DNA, 19 bp, Artificial Sequence
  Synthetic
tggggctggggccggggtc

SEQ ID NO: 1091 - DNA, 19 bp, Artificial Sequence
  Synthetic
ggggctggggccggggtcc

SEQ ID NO: 1092 - DNA, 19 bp, Artificial Sequence
  Synthetic
gggctggggccggggtccc

SEQ ID NO: 1093 - DNA, 19 bp, Artificial Sequence
  Synthetic
ggctggggccggggtcccc

SEQ ID NO: 1094 - DNA, 19 bp, Artificial Sequence
  Synthetic
gctggggccggggtcccca

SEQ ID NO: 1095 - DNA, 19 bp, Artificial Sequence
  Synthetic
ctggggccggggtccccag

SEQ ID NO: 1096 - DNA, 19 bp, Artificial Sequence
  Synthetic
tggggccggggtccccagg

SEQ ID NO: 1097 - DNA, 19 bp, Artificial Sequence
  Synthetic
ggggccggggtccccaggt

SEQ ID NO: 1098 - DNA, 19 bp, Artificial Sequence
  Synthetic
gggccggggtccccaggtc

SEQ ID NO: 1099 - DNA, 19 bp, Artificial Sequence
  Synthetic
ggccggggtccccaggtcg

SEQ ID NO: 1100 - DNA, 19 bp, Artificial Sequence
  Synthetic
gccggggtccccaggtcgc

SEQ ID NO: 1101 - DNA, 19 bp, Artificial Sequence
  Synthetic
ccggggtccccaggtcgcc

SEQ ID NO: 1102 - DNA, 19 bp, Artificial Sequence
  Synthetic
cggggtccccaggtcgccg

SEQ ID NO: 1103 - DNA, 19 bp, Artificial Sequence
  Synthetic
ggggtccccaggtcgccgg

SEQ ID NO: 1104 - DNA, 19 bp, Artificial Sequence
  Synthetic
gggtccccaggtcgccggg

SEQ ID NO: 1105 - DNA, 19 bp, Artificial Sequence
  Synthetic
ggtccccaggtcgccgggg

SEQ ID NO: 1106 - DNA, 19 bp, Artificial Sequence
  Synthetic
gtccccaggtcgccggggc

SEQ ID NO: 1107 - DNA, 19 bp, Artificial Sequence
  Synthetic
tccccaggtcgccggggcg

SEQ ID NO: 1108 - DNA, 19 bp, Artificial Sequence
  Synthetic
ccccaggtcgccggggcgg

SEQ ID NO: 1109 - DNA, 19 bp, Artificial Sequence
  Synthetic
cccaggtcgccggggcggc

SEQ ID NO: 1110 - DNA, 19 bp, Artificial Sequence
  Synthetic
ccaggtcgccggggcggcg

SEQ ID NO: 1111 - DNA, 19 bp, Artificial Sequence
  Synthetic
caggtcgccggggcggcgt

SEQ ID NO: 1112 - DNA, 19 bp, Artificial Sequence
  Synthetic
aggtcgccggggcggcgtg

SEQ ID NO: 1113 - DNA, 19 bp, Artificial Sequence
  Synthetic
ggtcgccggggcggcgtgg

SEQ ID NO: 1114 - DNA, 19 bp, Artificial Sequence
  Synthetic
gtcgccggggcggcgtggg

SEQ ID NO: 1115 - DNA, 19 bp, Artificial Sequence
  Synthetic
tcgccggggcggcgtggga

SEQ ID NO: 1116 - DNA, 19 bp, Artificial Sequence
  Synthetic
cgccggggcggcgtgggaa

SEQ ID NO: 1117 - DNA, 19 bp, Artificial Sequence
  Synthetic
gccggggcggcgtgggaac

SEQ ID NO: 1118 - DNA, 19 bp, Artificial Sequence
  Synthetic
ccggggcggcgtgggaacc

SEQ ID NO: 1119 - DNA, 19 bp, Artificial Sequence
  Synthetic
cggggcggcgtgggaaccc

SEQ ID NO: 1120 - DNA, 19 bp, Artificial Sequence
  Synthetic
ggggcggcgtgggaacccc

SEQ ID NO: 1121 - DNA, 19 bp, Artificial Sequence
  Synthetic
gggcggcgtgggaacccca

SEQ ID NO: 1122 - DNA, 19 bp, Artificial Sequence
  Synthetic
ggcggcgtgggaaccccaa

SEQ ID NO: 1123 - DNA, 19 bp, Artificial Sequence
  Synthetic
gcggcgtgggaaccccaag

SEQ ID NO: 1124 - DNA, 19 bp, Artificial Sequence
  Synthetic
cggcgtgggaaccccaagc

SEQ ID NO: 1125 - DNA, 19 bp, Artificial Sequence
  Synthetic
ggcgtgggaaccccaagcc

SEQ ID NO: 1126 - DNA, 19 bp, Artificial Sequence
  Synthetic
gcgtgggaaccccaagccg

SEQ ID NO: 1127 - DNA, 19 bp, Artificial Sequence
  Synthetic
cgtgggaaccccaagccgg

SEQ ID NO: 1128 - DNA, 19 bp, Artificial Sequence
  Synthetic
gtgggaaccccaagccggg

SEQ ID NO: 1129 - DNA, 19 bp, Artificial Sequence
  Synthetic
tgggaaccccaagccgggg

SEQ ID NO: 1130 - DNA, 19 bp, Artificial Sequence
  Synthetic
gggaaccccaagccggggc

SEQ ID NO: 1131 - DNA, 19 bp, Artificial Sequence
  Synthetic
ggaaccccaagccggggca

SEQ ID NO: 1132 - DNA, 19 bp, Artificial Sequence
  Synthetic
gaaccccaagccggggcag

SEQ ID NO: 1133 - DNA, 19 bp, Artificial Sequence
  Synthetic
aaccccaagccggggcagc

SEQ ID NO: 1134 - DNA, 19 bp, Artificial Sequence
  Synthetic
accccaagccggggcagct

SEQ ID NO: 1135 - DNA, 19 bp, Artificial Sequence
  Synthetic
ccccaagccggggcagctc

SEQ ID NO: 1136 - DNA, 19 bp, Artificial Sequence
  Synthetic
cccaagccggggcagctcc

SEQ ID NO: 1137 - DNA, 19 bp, Artificial Sequence
  Synthetic
ccaagccggggcagctcca

SEQ ID NO: 1138 - DNA, 19 bp, Artificial Sequence
  Synthetic
caagccggggcagctccac

SEQ ID NO: 1139 - DNA, 19 bp, Artificial Sequence
  Synthetic
aagccggggcagctccacc

SEQ ID NO: 1140 - DNA, 19 bp, Artificial Sequence
  Synthetic
agccggggcagctccacct

SEQ ID NO: 1141 - DNA, 19 bp, Artificial Sequence
  Synthetic
gccggggcagctccacctc

SEQ ID NO: 1142 - DNA, 19 bp, Artificial Sequence
  Synthetic
ccggggcagctccacctcc

SEQ ID NO: 1143 - DNA, 19 bp, Artificial Sequence
  Synthetic
cggggcagctccacctccc

SEQ ID NO: 1144 - DNA, 19 bp, Artificial Sequence
  Synthetic
ggggcagctccacctcccc

SEQ ID NO: 1145 - DNA, 19 bp, Artificial Sequence
  Synthetic
gggcagctccacctcccca

SEQ ID NO: 1146 - DNA, 19 bp, Artificial Sequence
  Synthetic
ggcagctccacctccccag

SEQ ID NO: 1147 - DNA, 19 bp, Artificial Sequence
  Synthetic
gcagctccacctccccagc

SEQ ID NO: 1148 - DNA, 19 bp, Artificial Sequence
  Synthetic
cagctccacctccccagcc

SEQ ID NO: 1149 - DNA, 19 bp, Artificial Sequence
  Synthetic
agctccacctccccagccc

SEQ ID NO: 1150 - DNA, 19 bp, Artificial Sequence
  Synthetic
gctccacctccccagcccg

SEQ ID NO: 1151 - DNA, 19 bp, Artificial Sequence
  Synthetic
ctccacctccccagcccgc

SEQ ID NO: 1152 - DNA, 19 bp, Artificial Sequence
  Synthetic
tccacctccccagcccgcg

SEQ ID NO: 1153 - DNA, 19 bp, Artificial Sequence
  Synthetic
ccacctccccagcccgcgc

SEQ ID NO: 1154 - DNA, 19 bp, Artificial Sequence
  Synthetic
cacctccccagcccgcgcc

SEQ ID NO: 1155 - DNA, 19 bp, Artificial Sequence
  Synthetic
acctccccagcccgcgccc

SEQ ID NO: 1156 - DNA, 19 bp, Artificial Sequence
  Synthetic
cctccccagcccgcgcccc

SEQ ID NO: 1157 - DNA, 19 bp, Artificial Sequence
  Synthetic
ctccccagcccgcgccccc

SEQ ID NO: 1158 - DNA, 19 bp, Artificial Sequence
  Synthetic
tccccagcccgcgcccccg

SEQ ID NO: 1159 - DNA, 19 bp, Artificial Sequence
  Synthetic
ccccagcccgcgcccccgg

SEQ ID NO: 1160 - DNA, 19 bp, Artificial Sequence
  Synthetic
cccagcccgcgcccccgga

SEQ ID NO: 1161 - DNA, 19 bp, Artificial Sequence
  Synthetic
ccagcccgcgcccccggac

SEQ ID NO: 1162 - DNA, 19 bp, Artificial Sequence
  Synthetic
cagcccgcgcccccggacg

SEQ ID NO: 1163 - DNA, 19 bp, Artificial Sequence
  Synthetic
agcccgcgcccccggacgc

SEQ ID NO: 1164 - DNA, 19 bp, Artificial Sequence
  Synthetic
gcccgcgcccccggacgcc

SEQ ID NO: 1165 - DNA, 19 bp, Artificial Sequence
  Synthetic
cccgcgcccccggacgcct

SEQ ID NO: 1166 - DNA, 19 bp, Artificial Sequence
  Synthetic
ccgcgcccccggacgcctc

SEQ ID NO: 1167 - DNA, 19 bp, Artificial Sequence
  Synthetic
cgcgcccccggacgcctcc

SEQ ID NO: 1168 - DNA, 19 bp, Artificial Sequence
  Synthetic
gcgcccccggacgcctccg

SEQ ID NO: 1169 - DNA, 19 bp, Artificial Sequence
  Synthetic
cgcccccggacgcctccgc

SEQ ID NO: 1170 - DNA, 19 bp, Artificial Sequence
  Synthetic
gcccccggacgcctccgcc

SEQ ID NO: 1171 - DNA, 19 bp, Artificial Sequence
  Synthetic
cccccggacgcctccgcct

SEQ ID NO: 1172 - DNA, 19 bp, Artificial Sequence
  Synthetic
ccccggacgcctccgcctc

SEQ ID NO: 1173 - DNA, 19 bp, Artificial Sequence
  Synthetic
cccggacgcctccgcctcc

SEQ ID NO: 1174 - DNA, 19 bp, Artificial Sequence
  Synthetic
ccggacgcctccgcctccg

SEQ ID NO: 1175 - DNA, 19 bp, Artificial Sequence
  Synthetic
cggacgcctccgcctccgc

SEQ ID NO: 1176 - DNA, 19 bp, Artificial Sequence
  Synthetic
ggacgcctccgcctccgcg

SEQ ID NO: 1177 - DNA, 19 bp, Artificial Sequence
  Synthetic
gacgcctccgcctccgcgc

SEQ ID NO: 1178 - DNA, 19 bp, Artificial Sequence
  Synthetic
acgcctccgcctccgcgcg

SEQ ID NO: 1179 - DNA, 19 bp, Artificial Sequence
  Synthetic
cgcctccgcctccgcgcgg

SEQ ID NO: 1180 - DNA, 19 bp, Artificial Sequence
  Synthetic
gcctccgcctccgcgcggc

SEQ ID NO: 1181 - DNA, 19 bp, Artificial Sequence
  Synthetic
cctccgcctccgcgcggca

SEQ ID NO: 1182 - DNA, 19 bp, Artificial Sequence
  Synthetic
ctccgcctccgcgcggcag

SEQ ID NO: 1183 - DNA, 19 bp, Artificial Sequence
  Synthetic
tccgcctccgcgcggcagg

SEQ ID NO: 1184 - DNA, 19 bp, Artificial Sequence
  Synthetic
ccgcctccgcgcggcaggg

SEQ ID NO: 1185 - DNA, 19 bp, Artificial Sequence
  Synthetic
cgcctccgcgcggcagggg

SEQ ID NO: 1186 - DNA, 19 bp, Artificial Sequence
  Synthetic
gcctccgcgcggcaggggc

SEQ ID NO: 1187 - DNA, 19 bp, Artificial Sequence
  Synthetic
cctccgcgcggcaggggca

SEQ ID NO: 1188 - DNA, 19 bp, Artificial Sequence
  Synthetic
ctccgcgcggcaggggcag

SEQ ID NO: 1189 - DNA, 19 bp, Artificial Sequence
  Synthetic
tccgcgcggcaggggcaga

SEQ ID NO: 1190 - DNA, 19 bp, Artificial Sequence
  Synthetic
ccgcgcggcaggggcagat

SEQ ID NO: 1191 - DNA, 19 bp, Artificial Sequence
  Synthetic
cgcgcggcaggggcagatg

SEQ ID NO: 1192 - DNA, 19 bp, Artificial Sequence
  Synthetic
gcgcggcaggggcagatgc

SEQ ID NO: 1193 - DNA, 19 bp, Artificial Sequence
  Synthetic
cgcggcaggggcagatgca

SEQ ID NO: 1194 - DNA, 19 bp, Artificial Sequence
  Synthetic
gcggcaggggcagatgcaa

SEQ ID NO: 1195 - DNA, 19 bp, Artificial Sequence
  Synthetic
cggcaggggcagatgcaag

SEQ ID NO: 1196 - DNA, 19 bp, Artificial Sequence
  Synthetic
ggcaggggcagatgcaagg

SEQ ID NO: 1197 - DNA, 19 bp, Artificial Sequence
  Synthetic
gcaggggcagatgcaaggc

SEQ ID NO: 1198 - DNA, 19 bp, Artificial Sequence
  Synthetic
caggggcagatgcaaggca

SEQ ID NO: 1199 - DNA, 19 bp, Artificial Sequence
  Synthetic
aggggcagatgcaaggcat

SEQ ID NO: 1200 - DNA, 19 bp, Artificial Sequence
  Synthetic
ggggcagatgcaaggcatc

SEQ ID NO: 1201 - DNA, 19 bp, Artificial Sequence
  Synthetic
gggcagatgcaaggcatcc

SEQ ID NO: 1202 - DNA, 19 bp, Artificial Sequence
  Synthetic
ggcagatgcaaggcatccc

SEQ ID NO: 1203 - DNA, 19 bp, Artificial Sequence
  Synthetic
gcagatgcaaggcatcccg

SEQ ID NO: 1204 - DNA, 19 bp, Artificial Sequence
  Synthetic
cagatgcaaggcatcccgg

SEQ ID NO: 1205 - DNA, 19 bp, Artificial Sequence
  Synthetic
agatgcaaggcatcccggc

SEQ ID NO: 1206 - DNA, 19 bp, Artificial Sequence
  Synthetic
gatgcaaggcatcccggcg

SEQ ID NO: 1207 - DNA, 19 bp, Artificial Sequence
  Synthetic
atgcaaggcatcccggcgc

SEQ ID NO: 1208 - DNA, 19 bp, Artificial Sequence
  Synthetic
tgcaaggcatcccggcgcc

SEQ ID NO: 1209 - DNA, 19 bp, Artificial Sequence
  Synthetic
gcaaggcatcccggcgccc

SEQ ID NO: 1210 - DNA, 19 bp, Artificial Sequence
  Synthetic
caaggcatcccggcgccct

SEQ ID NO: 1211 - DNA, 19 bp, Artificial Sequence
  Synthetic
aaggcatcccggcgccctc

SEQ ID NO: 1212 - DNA, 19 bp, Artificial Sequence
  Synthetic
aggcatcccggcgccctcc

SEQ ID NO: 1213 - DNA, 19 bp, Artificial Sequence
  Synthetic
ggcatcccggcgccctccc

SEQ ID NO: 1214 - DNA, 19 bp, Artificial Sequence
  Synthetic
gcatcccggcgccctccca

SEQ ID NO: 1215 - DNA, 19 bp, Artificial Sequence
  Synthetic
catcccggcgccctcccag

SEQ ID NO: 1216 - DNA, 19 bp, Artificial Sequence
  Synthetic
atcccggcgccctcccagg

SEQ ID NO: 1217 - DNA, 19 bp, Artificial Sequence
  Synthetic
tcccggcgccctcccaggc

SEQ ID NO: 1218 - DNA, 19 bp, Artificial Sequence
  Synthetic
cccggcgccctcccaggcg

SEQ ID NO: 1219 - DNA, 19 bp, Artificial Sequence
  Synthetic
ccggcgccctcccaggcgc

SEQ ID NO: 1220 - DNA, 19 bp, Artificial Sequence
  Synthetic
cggcgccctcccaggcgct

SEQ ID NO: 1221 - DNA, 19 bp, Artificial Sequence
  Synthetic
ggcgccctcccaggcgctc

SEQ ID NO: 1222 - DNA, 19 bp, Artificial Sequence
  Synthetic
gcgccctcccaggcgctcc

SEQ ID NO: 1223 - DNA, 19 bp, Artificial Sequence
  Synthetic
cgccctcccaggcgctcca

SEQ ID NO: 1224 - DNA, 19 bp, Artificial Sequence
  Synthetic
gccctcccaggcgctccag

SEQ ID NO: 1225 - DNA, 19 bp, Artificial Sequence
  Synthetic
ccctcccaggcgctccagg

SEQ ID NO: 1226 - DNA, 19 bp, Artificial Sequence
  Synthetic
cctcccaggcgctccagga

SEQ ID NO: 1227 - DNA, 19 bp, Artificial Sequence
  Synthetic
ctcccaggcgctccaggag

SEQ ID NO: 1228 - DNA, 19 bp, Artificial Sequence
  Synthetic
tcccaggcgctccaggagc

SEQ ID NO: 1229 - DNA, 19 bp, Artificial Sequence
  Synthetic
cccaggcgctccaggagcc

SEQ ID NO: 1230 - DNA, 19 bp, Artificial Sequence
  Synthetic
ccaggcgctccaggagccg

SEQ ID NO: 1231 - DNA, 19 bp, Artificial Sequence
  Synthetic
caggcgctccaggagccgg

SEQ ID NO: 1232 - DNA, 19 bp, Artificial Sequence
  Synthetic
aggcgctccaggagccggc

SEQ ID NO: 1233 - DNA, 19 bp, Artificial Sequence
  Synthetic
ggcgctccaggagccggcg

SEQ ID NO: 1234 - DNA, 19 bp, Artificial Sequence
  Synthetic
gcgctccaggagccggcgc

SEQ ID NO: 1235 - DNA, 19 bp, Artificial Sequence
  Synthetic
cgctccaggagccggcgcc

SEQ ID NO: 1236 - DNA, 19 bp, Artificial Sequence
  Synthetic
gctccaggagccggcgccc

SEQ ID NO: 1237 - DNA, 19 bp, Artificial Sequence
  Synthetic
ctccaggagccggcgccct

SEQ ID NO: 1238 - DNA, 19 bp, Artificial Sequence
  Synthetic
tccaggagccggcgccctg

SEQ ID NO: 1239 - DNA, 19 bp, Artificial Sequence
  Synthetic
ccaggagccggcgccctgg

SEQ ID NO: 1240 - DNA, 19 bp, Artificial Sequence
  Synthetic
caggagccggcgccctggt

SEQ ID NO: 1241 - DNA, 19 bp, Artificial Sequence
  Synthetic
aggagccggcgccctggtc

SEQ ID NO: 1242 - DNA, 19 bp, Artificial Sequence
  Synthetic
ggagccggcgccctggtct

SEQ ID NO: 1243 - DNA, 19 bp, Artificial Sequence
  Synthetic
gagccggcgccctggtctg

SEQ ID NO: 1244 - DNA, 19 bp, Artificial Sequence
  Synthetic
agccggcgccctggtctgc

SEQ ID NO: 1245 - DNA, 19 bp, Artificial Sequence
  Synthetic
gccggcgccctggtctgca

SEQ ID NO: 1246 - DNA, 19 bp, Artificial Sequence
  Synthetic
ccggcgccctggtctgcac

SEQ ID NO: 1247 - DNA, 19 bp, Artificial Sequence
  Synthetic
cggcgccctggtctgcact

SEQ ID NO: 1248 - DNA, 19 bp, Artificial Sequence
  Synthetic
ggcgccctggtctgcactc

SEQ ID NO: 1249 - DNA, 19 bp, Artificial Sequence
  Synthetic
gcgccctggtctgcactcc

SEQ ID NO: 1250 - DNA, 19 bp, Artificial Sequence
  Synthetic
cgccctggtctgcactccc

SEQ ID NO: 1251 - DNA, 19 bp, Artificial Sequence
  Synthetic
gccctggtctgcactcccc

SEQ ID NO: 1252 - DNA, 19 bp, Artificial Sequence
  Synthetic
ccctggtctgcactcccct

SEQ ID NO: 1253 - DNA, 19 bp, Artificial Sequence
  Synthetic
cctggtctgcactcccctg

SEQ ID NO: 1254 - DNA, 19 bp, Artificial Sequence
  Synthetic
ctggtctgcactcccctgc

SEQ ID NO: 1255 - DNA, 19 bp, Artificial Sequence
  Synthetic
tggtctgcactcccctgcg

SEQ ID NO: 1256 - DNA, 19 bp, Artificial Sequence
  Synthetic
ggtctgcactcccctgcgg

SEQ ID NO: 1257 - DNA, 19 bp, Artificial Sequence
  Synthetic
gtctgcactcccctgcggc

SEQ ID NO: 1258 - DNA, 19 bp, Artificial Sequence
  Synthetic
tctgcactcccctgcggcc

SEQ ID NO: 1259 - DNA, 19 bp, Artificial Sequence
  Synthetic
ctgcactcccctgcggcct

SEQ ID NO: 1260 - DNA, 19 bp, Artificial Sequence
  Synthetic
tgcactcccctgcggcctg

SEQ ID NO: 1261 - DNA, 19 bp, Artificial Sequence
  Synthetic
gcactcccctgcggcctgc

SEQ ID NO: 1262 - DNA, 19 bp, Artificial Sequence
  Synthetic
cactcccctgcggcctgct

SEQ ID NO: 1263 - DNA, 19 bp, Artificial Sequence
  Synthetic
actcccctgcggcctgctg

SEQ ID NO: 1264 - DNA, 19 bp, Artificial Sequence
  Synthetic
ctcccctgcggcctgctgc

SEQ ID NO: 1265 - DNA, 19 bp, Artificial Sequence
  Synthetic
tcccctgcggcctgctgct

SEQ ID NO: 1266 - DNA, 19 bp, Artificial Sequence
  Synthetic
cccctgcggcctgctgctg

SEQ ID NO: 1267 - DNA, 19 bp, Artificial Sequence
  Synthetic
ccctgcggcctgctgctgg

SEQ ID NO: 1268 - DNA, 19 bp, Artificial Sequence
  Synthetic
cctgcggcctgctgctgga

SEQ ID NO: 1269 - DNA, 19 bp, Artificial Sequence
  Synthetic
ctgcggcctgctgctggat

SEQ ID NO: 1270 - DNA, 19 bp, Artificial Sequence
  Synthetic
tgcggcctgctgctggatg

SEQ ID NO: 1271 - DNA, 19 bp, Artificial Sequence
  Synthetic
gcggcctgctgctggatga

SEQ ID NO: 1272 - DNA, 19 bp, Artificial Sequence
  Synthetic
cggcctgctgctggatgag

SEQ ID NO: 1273 - DNA, 19 bp, Artificial Sequence
  Synthetic
ggcctgctgctggatgagc

SEQ ID NO: 1274 - DNA, 19 bp, Artificial Sequence
  Synthetic
gcctgctgctggatgagct

SEQ ID NO: 1275 - DNA, 19 bp, Artificial Sequence
  Synthetic
cctgctgctggatgagctc

SEQ ID NO: 1276 - DNA, 19 bp, Artificial Sequence
  Synthetic
ctgctgctggatgagctcc

SEQ ID NO: 1277 - DNA, 19 bp, Artificial Sequence
  Synthetic
tgctgctggatgagctcct

SEQ ID NO: 1278 - DNA, 19 bp, Artificial Sequence
  Synthetic
gctgctggatgagctcctg

SEQ ID NO: 1279 - DNA, 19 bp, Artificial Sequence
  Synthetic
ctgctggatgagctcctgg

SEQ ID NO: 1280 - DNA, 19 bp, Artificial Sequence
  Synthetic
tgctggatgagctcctggc

SEQ ID NO: 1281 - DNA, 19 bp, Artificial Sequence
  Synthetic
gctggatgagctcctggcg

SEQ ID NO: 1282 - DNA, 19 bp, Artificial Sequence
  Synthetic
ctggatgagctcctggcga

SEQ ID NO: 1283 - DNA, 19 bp, Artificial Sequence
  Synthetic
tggatgagctcctggcgag

SEQ ID NO: 1284 - DNA, 19 bp, Artificial Sequence
  Synthetic
ggatgagctcctggcgagc

SEQ ID NO: 1285 - DNA, 19 bp, Artificial Sequence
  Synthetic
gatgagctcctggcgagcc

SEQ ID NO: 1286 - DNA, 19 bp, Artificial Sequence
  Synthetic
atgagctcctggcgagccc

SEQ ID NO: 1287 - DNA, 19 bp, Artificial Sequence
  Synthetic
tgagctcctggcgagcccg

SEQ ID NO: 1288 - DNA, 19 bp, Artificial Sequence
  Synthetic
gagctcctggcgagcccgg

SEQ ID NO: 1289 - DNA, 19 bp, Artificial Sequence
  Synthetic
agctcctggcgagcccgga

SEQ ID NO: 1290 - DNA, 19 bp, Artificial Sequence
  Synthetic
gctcctggcgagcccggag

SEQ ID NO: 1291 - DNA, 19 bp, Artificial Sequence
  Synthetic
ctcctggcgagcccggagt

SEQ ID NO: 1292 - DNA, 19 bp, Artificial Sequence
  Synthetic
tcctggcgagcccggagtt

SEQ ID NO: 1293 - DNA, 19 bp, Artificial Sequence
  Synthetic
cctggcgagcccggagttt

SEQ ID NO: 1294 - DNA, 19 bp, Artificial Sequence
  Synthetic
ctggcgagcccggagtttc

SEQ ID NO: 1295 - DNA, 19 bp, Artificial Sequence
  Synthetic
tggcgagcccggagtttct

SEQ ID NO: 1296 - DNA, 19 bp, Artificial Sequence
  Synthetic
ggcgagcccggagtttctg

SEQ ID NO: 1297 - DNA, 19 bp, Artificial Sequence
  Synthetic
gcgagcccggagtttctgc

SEQ ID NO: 1298 - DNA, 19 bp, Artificial Sequence
  Synthetic
cgagcccggagtttctgca

SEQ ID NO: 1299 - DNA, 19 bp, Artificial Sequence
  Synthetic
gagcccggagtttctgcag

SEQ ID NO: 1300 - DNA, 19 bp, Artificial Sequence
  Synthetic
agcccggagtttctgcagc

SEQ ID NO: 1301 - DNA, 19 bp, Artificial Sequence
  Synthetic
gcccggagtttctgcagca

SEQ ID NO: 1302 - DNA, 19 bp, Artificial Sequence
  Synthetic
cccggagtttctgcagcag

SEQ ID NO: 1303 - DNA, 19 bp, Artificial Sequence
  Synthetic
ccggagtttctgcagcagg

SEQ ID NO: 1304 - DNA, 19 bp, Artificial Sequence
  Synthetic
cggagtttctgcagcaggc

SEQ ID NO: 1305 - DNA, 19 bp, Artificial Sequence
  Synthetic
ggagtttctgcagcaggcg

SEQ ID NO: 1306 - DNA, 19 bp, Artificial Sequence
  Synthetic
gagtttctgcagcaggcgc

SEQ ID NO: 1307 - DNA, 19 bp, Artificial Sequence
  Synthetic
agtttctgcagcaggcgca

SEQ ID NO: 1308 - DNA, 19 bp, Artificial Sequence
  Synthetic
gtttctgcagcaggcgcaa

SEQ ID NO: 1309 - DNA, 19 bp, Artificial Sequence
  Synthetic
tttctgcagcaggcgcaac

SEQ ID NO: 1310 - DNA, 19 bp, Artificial Sequence
  Synthetic
ttctgcagcaggcgcaacc

SEQ ID NO: 1311 - DNA, 19 bp, Artificial Sequence
  Synthetic
tctgcagcaggcgcaacct

SEQ ID NO: 1312 - DNA, 19 bp, Artificial Sequence
  Synthetic
ctgcagcaggcgcaacctc

SEQ ID NO: 1313 - DNA, 19 bp, Artificial Sequence
  Synthetic
tgcagcaggcgcaacctct

SEQ ID NO: 1314 - DNA, 19 bp, Artificial Sequence
  Synthetic
gcagcaggcgcaacctctc

SEQ ID NO: 1315 - DNA, 19 bp, Artificial Sequence
  Synthetic
cagcaggcgcaacctctcc

SEQ ID NO: 1316 - DNA, 19 bp, Artificial Sequence
  Synthetic
agcaggcgcaacctctcct

SEQ ID NO: 1317 - DNA, 19 bp, Artificial Sequence
  Synthetic
gcaggcgcaacctctccta

SEQ ID NO: 1318 - DNA, 19 bp, Artificial Sequence
  Synthetic
caggcgcaacctctcctag

SEQ ID NO: 1319 - DNA, 19 bp, Artificial Sequence
  Synthetic
aggcgcaacctctcctaga

SEQ ID NO: 1320 - DNA, 19 bp, Artificial Sequence
  Synthetic
ggcgcaacctctcctagaa

SEQ ID NO: 1321 - DNA, 19 bp, Artificial Sequence
  Synthetic
gcgcaacctctcctagaaa

SEQ ID NO: 1322 - DNA, 19 bp, Artificial Sequence
  Synthetic
cgcaacctctcctagaaac

SEQ ID NO: 1323 - DNA, 19 bp, Artificial Sequence
  Synthetic
gcaacctctcctagaaacg

SEQ ID NO: 1324 - DNA, 19 bp, Artificial Sequence
  Synthetic
caacctctcctagaaacgg

SEQ ID NO: 1325 - DNA, 19 bp, Artificial Sequence
  Synthetic
aacctctcctagaaacgga

SEQ ID NO: 1326 - DNA, 19 bp, Artificial Sequence
  Synthetic
acctctcctagaaacggag

SEQ ID NO: 1327 - DNA, 19 bp, Artificial Sequence
  Synthetic
cctctcctagaaacggagg

SEQ ID NO: 1328 - DNA, 19 bp, Artificial Sequence
  Synthetic
ctctcctagaaacggaggc

SEQ ID NO: 1329 - DNA, 19 bp, Artificial Sequence
  Synthetic
tctcctagaaacggaggcc

SEQ ID NO: 1330 - DNA, 19 bp, Artificial Sequence
  Synthetic
ctcctagaaacggaggccc

SEQ ID NO: 1331 - DNA, 19 bp, Artificial Sequence
  Synthetic
tcctagaaacggaggcccc

SEQ ID NO: 1332 - DNA, 19 bp, Artificial Sequence
  Synthetic
cctagaaacggaggccccg

SEQ ID NO: 1333 - DNA, 19 bp, Artificial Sequence
  Synthetic
ctagaaacggaggccccgg

SEQ ID NO: 1334 - DNA, 19 bp, Artificial Sequence
  Synthetic
tagaaacggaggccccggg

SEQ ID NO: 1335 - DNA, 19 bp, Artificial Sequence
  Synthetic
agaaacggaggccccgggg

SEQ ID NO: 1336 - DNA, 19 bp, Artificial Sequence
  Synthetic
gaaacggaggccccggggg

SEQ ID NO: 1337 - DNA, 19 bp, Artificial Sequence
  Synthetic
aaacggaggccccggggga

SEQ ID NO: 1338 - DNA, 19 bp, Artificial Sequence
  Synthetic
aacggaggccccgggggag

SEQ ID NO: 1339 - DNA, 19 bp, Artificial Sequence
  Synthetic
acggaggccccgggggagc

SEQ ID NO: 1340 - DNA, 19 bp, Artificial Sequence
  Synthetic
cggaggccccgggggagct

SEQ ID NO: 1341 - DNA, 19 bp, Artificial Sequence
  Synthetic
ggaggccccgggggagctg

SEQ ID NO: 1342 - DNA, 19 bp, Artificial Sequence
  Synthetic
gaggccccgggggagctgg

SEQ ID NO: 1343 - DNA, 19 bp, Artificial Sequence
  Synthetic
aggccccgggggagctgga

SEQ ID NO: 1344 - DNA, 19 bp, Artificial Sequence
  Synthetic
ggccccgggggagctggag

SEQ ID NO: 1345 - DNA, 19 bp, Artificial Sequence
  Synthetic
gccccgggggagctggagg

SEQ ID NO: 1346 - DNA, 19 bp, Artificial Sequence
  Synthetic
ccccgggggagctggaggc

SEQ ID NO: 1347 - DNA, 19 bp, Artificial Sequence
  Synthetic
cccgggggagctggaggcc

SEQ ID NO: 1348 - DNA, 19 bp, Artificial Sequence
  Synthetic
ccgggggagctggaggcct

SEQ ID NO: 1349 - DNA, 19 bp, Artificial Sequence
  Synthetic
cgggggagctggaggcctc

SEQ ID NO: 1350 - DNA, 19 bp, Artificial Sequence
  Synthetic
gggggagctggaggcctcg

SEQ ID NO: 1351 - DNA, 19 bp, Artificial Sequence
  Synthetic
ggggagctggaggcctcgg

SEQ ID NO: 1352 - DNA, 19 bp, Artificial Sequence
  Synthetic
gggagctggaggcctcgga

SEQ ID NO: 1353 - DNA, 19 bp, Artificial Sequence
  Synthetic
ggagctggaggcctcggaa

SEQ ID NO: 1354 - DNA, 19 bp, Artificial Sequence
  Synthetic
gagctggaggcctcggaag

SEQ ID NO: 1355 - DNA, 19 bp, Artificial Sequence
  Synthetic
agctggaggcctcggaaga

SEQ ID NO: 1356 - DNA, 19 bp, Artificial Sequence
  Synthetic
gctggaggcctcggaagag

SEQ ID NO: 1357 - DNA, 19 bp, Artificial Sequence
  Synthetic
ctggaggcctcggaagagg

SEQ ID NO: 1358 - DNA, 19 bp, Artificial Sequence
  Synthetic
tggaggcctcggaagaggc

SEQ ID NO: 1359 - DNA, 19 bp, Artificial Sequence
  Synthetic
ggaggcctcggaagaggcc

SEQ ID NO: 1360 - DNA, 19 bp, Artificial Sequence
  Synthetic
gaggcctcggaagaggccg

SEQ ID NO: 1361 - DNA, 19 bp, Artificial Sequence
  Synthetic
aggcctcggaagaggccgc

SEQ ID NO: 1362 - DNA, 19 bp, Artificial Sequence
  Synthetic
ggcctcggaagaggccgcc

SEQ ID NO: 1363 - DNA, 19 bp, Artificial Sequence
  Synthetic
gcctcggaagaggccgcct

SEQ ID NO: 1364 - DNA, 19 bp, Artificial Sequence
  Synthetic
cctcggaagaggccgcctc

SEQ ID NO: 1365 - DNA, 19 bp, Artificial Sequence
  Synthetic
ctcggaagaggccgcctcg

SEQ ID NO: 1366 - DNA, 19 bp, Artificial Sequence
  Synthetic
tcggaagaggccgcctcgc

SEQ ID NO: 1367 - DNA, 19 bp, Artificial Sequence
  Synthetic
cggaagaggccgcctcgct

SEQ ID NO: 1368 - DNA, 19 bp, Artificial Sequence
  Synthetic
ggaagaggccgcctcgctg

SEQ ID NO: 1369 - DNA, 19 bp, Artificial Sequence
  Synthetic
gaagaggccgcctcgctgg

SEQ ID NO: 1370 - DNA, 19 bp, Artificial Sequence
  Synthetic
aagaggccgcctcgctgga

SEQ ID NO: 1371 - DNA, 19 bp, Artificial Sequence
  Synthetic
agaggccgcctcgctggaa

SEQ ID NO: 1372 - DNA, 19 bp, Artificial Sequence
  Synthetic
gaggccgcctcgctggaag

SEQ ID NO: 1373 - DNA, 19 bp, Artificial Sequence
  Synthetic
aggccgcctcgctggaagc

SEQ ID NO: 1374 - DNA, 19 bp, Artificial Sequence
  Synthetic
ggccgcctcgctggaagca

SEQ ID NO: 1375 - DNA, 19 bp, Artificial Sequence
  Synthetic
gccgcctcgctggaagcac

SEQ ID NO: 1376 - DNA, 19 bp, Artificial Sequence
  Synthetic
ccgcctcgctggaagcacc

SEQ ID NO: 1377 - DNA, 19 bp, Artificial Sequence
  Synthetic
cgcctcgctggaagcaccc

SEQ ID NO: 1378 - DNA, 19 bp, Artificial Sequence
  Synthetic
gcctcgctggaagcacccc

SEQ ID NO: 1379 - DNA, 19 bp, Artificial Sequence
  Synthetic
cctcgctggaagcacccct

SEQ ID NO: 1380 - DNA, 19 bp, Artificial Sequence
  Synthetic
ctcgctggaagcacccctc

SEQ ID NO: 1381 - DNA, 19 bp, Artificial Sequence
  Synthetic
tcgctggaagcacccctca

SEQ ID NO: 1382 - DNA, 19 bp, Artificial Sequence
  Synthetic
cgctggaagcacccctcag

SEQ ID NO: 1383 - DNA, 19 bp, Artificial Sequence
  Synthetic
gctggaagcacccctcagc

SEQ ID NO: 1384 - DNA, 19 bp, Artificial Sequence
  Synthetic
ctggaagcacccctcagcg

SEQ ID NO: 1385 - DNA, 19 bp, Artificial Sequence
  Synthetic
tggaagcacccctcagcga

SEQ ID NO: 1386 - DNA, 19 bp, Artificial Sequence
  Synthetic
ggaagcacccctcagcgag

SEQ ID NO: 1387 - DNA, 19 bp, Artificial Sequence
  Synthetic
gaagcacccctcagcgagg

SEQ ID NO: 1388 - DNA, 19 bp, Artificial Sequence
  Synthetic
aagcacccctcagcgagga

SEQ ID NO: 1389 - DNA, 19 bp, Artificial Sequence
  Synthetic
agcacccctcagcgaggaa

SEQ ID NO: 1390 - DNA, 19 bp, Artificial Sequence
  Synthetic
gcacccctcagcgaggaag

SEQ ID NO: 1391 - DNA, 19 bp, Artificial Sequence
  Synthetic
cacccctcagcgaggaaga

SEQ ID NO: 1392 - DNA, 19 bp, Artificial Sequence
  Synthetic
acccctcagcgaggaagaa

SEQ ID NO: 1393 - DNA, 19 bp, Artificial Sequence
  Synthetic
cccctcagcgaggaagaat

SEQ ID NO: 1394 - DNA, 19 bp, Artificial Sequence
  Synthetic
ccctcagcgaggaagaata

SEQ ID NO: 1395 - DNA, 19 bp, Artificial Sequence
  Synthetic
cctcagcgaggaagaatac

SEQ ID NO: 1396 - DNA, 19 bp, Artificial Sequence
  Synthetic
ctcagcgaggaagaatacc

SEQ ID NO: 1397 - DNA, 19 bp, Artificial Sequence
  Synthetic
tcagcgaggaagaataccg

SEQ ID NO: 1398 - DNA, 19 bp, Artificial Sequence
  Synthetic
cagcgaggaagaataccgg

SEQ ID NO: 1399 - DNA, 19 bp, Artificial Sequence
  Synthetic
agcgaggaagaataccggg

SEQ ID NO: 1400 - DNA, 19 bp, Artificial Sequence
  Synthetic
gcgaggaagaataccgggc

SEQ ID NO: 1401 - DNA, 19 bp, Artificial Sequence
  Synthetic
cgaggaagaataccgggct

SEQ ID NO: 1402 - DNA, 19 bp, Artificial Sequence
  Synthetic
gaggaagaataccgggctc

SEQ ID NO: 1403 - DNA, 19 bp, Artificial Sequence
  Synthetic
aggaagaataccgggctct

SEQ ID NO: 1404 - DNA, 19 bp, Artificial Sequence
  Synthetic
ggaagaataccgggctctg

SEQ ID NO: 1405 - DNA, 19 bp, Artificial Sequence
  Synthetic
gaagaataccgggctctgc

SEQ ID NO: 1406 - DNA, 19 bp, Artificial Sequence
  Synthetic
aagaataccgggctctgct

SEQ ID NO: 1407 - DNA, 19 bp, Artificial Sequence
  Synthetic
agaataccgggctctgctg

SEQ ID NO: 1408 - DNA, 19 bp, Artificial Sequence
  Synthetic
gaataccgggctctgctgg

SEQ ID NO: 1409 - DNA, 19 bp, Artificial Sequence
  Synthetic
aataccgggctctgctgga

SEQ ID NO: 1410 - DNA, 19 bp, Artificial Sequence
  Synthetic
ataccgggctctgctggag

SEQ ID NO: 1411 - DNA, 19 bp, Artificial Sequence
  Synthetic
taccgggctctgctggagg

SEQ ID NO: 1412 - DNA, 19 bp, Artificial Sequence
  Synthetic
accgggctctgctggagga

SEQ ID NO: 1413 - DNA, 19 bp, Artificial Sequence
  Synthetic
ccgggctctgctggaggag

SEQ ID NO: 1414 - DNA, 19 bp, Artificial Sequence
  Synthetic
cgggctctgctggaggagc

SEQ ID NO: 1415 - DNA, 19 bp, Artificial Sequence
  Synthetic
gggctctgctggaggagct

SEQ ID NO: 1416 - DNA, 19 bp, Artificial Sequence
  Synthetic
ggctctgctggaggagctt

SEQ ID NO: 1417 - DNA, 19 bp, Artificial Sequence
  Synthetic
gctctgctggaggagcttt

SEQ ID NO: 1418 - DNA, 19 bp, Artificial Sequence
  Synthetic
ctctgctggaggagcttta

SEQ ID NO: 1419 - DNA, 19 bp, Artificial Sequence
  Synthetic
tctgctggaggagctttag

SEQ ID NO: 1420 - DNA, 19 bp, Artificial Sequence
  Synthetic
ctgctggaggagctttagg

SEQ ID NO: 1421 - DNA, 19 bp, Artificial Sequence
  Synthetic
tgctggaggagctttagga

SEQ ID NO: 1422 - DNA, 19 bp, Artificial Sequence
  Synthetic
gctggaggagctttaggac

SEQ ID NO: 1423 - DNA, 19 bp, Artificial Sequence
  Synthetic
ctctctttcgcggggaaca

SEQ ID NO: 1424 - DNA, 19 bp, Artificial Sequence
  Synthetic
tctctttcgcggggaacac

SEQ ID NO: 1425 - DNA, 19 bp, Artificial Sequence
  Synthetic
ctctttcgcggggaacacc

SEQ ID NO: 1426 - DNA, 19 bp, Artificial Sequence
  Synthetic
tctttcgcggggaacacct

SEQ ID NO: 1427 - DNA, 19 bp, Artificial Sequence
  Synthetic
ctttcgcggggaacacctg

SEQ ID NO: 1428 - DNA, 19 bp, Artificial Sequence
  Synthetic
tttcgcggggaacacctgg

SEQ ID NO: 1429 - DNA, 19 bp, Artificial Sequence
  Synthetic
ttcgcggggaacacctggc

SEQ ID NO: 1430 - DNA, 19 bp, Artificial Sequence
  Synthetic
tcgcggggaacacctggct

SEQ ID NO: 1431 - DNA, 19 bp, Artificial Sequence
  Synthetic
cgcggggaacacctggctg

SEQ ID NO: 1432 - DNA, 19 bp, Artificial Sequence
  Synthetic
gcggggaacacctggctgg

SEQ ID NO: 1433 - DNA, 19 bp, Artificial Sequence
  Synthetic
cggggaacacctggctggc

SEQ ID NO: 1434 - DNA, 19 bp, Artificial Sequence
  Synthetic
ggggaacacctggctggct

SEQ ID NO: 1435 - DNA, 19 bp, Artificial Sequence
  Synthetic
gggaacacctggctggcta

SEQ ID NO: 1436 - DNA, 19 bp, Artificial Sequence
  Synthetic
ggaacacctggctggctac

SEQ ID NO: 1437 - DNA, 19 bp, Artificial Sequence
  Synthetic
gaacacctggctggctacg

SEQ ID NO: 1438 - DNA, 19 bp, Artificial Sequence
  Synthetic
aacacctggctggctacgg

SEQ ID NO: 1439 - DNA, 19 bp, Artificial Sequence
  Synthetic
acacctggctggctacgga

SEQ ID NO: 1440 - DNA, 19 bp, Artificial Sequence
  Synthetic
cacctggctggctacggag

SEQ ID NO: 1441 - DNA, 19 bp, Artificial Sequence
  Synthetic
acctggctggctacggagg

SEQ ID NO: 1442 - DNA, 19 bp, Artificial Sequence
  Synthetic
cctggctggctacggaggg

SEQ ID NO: 1443 - DNA, 19 bp, Artificial Sequence
  Synthetic
ctggctggctacggagggg

SEQ ID NO: 1444 - DNA, 19 bp, Artificial Sequence
  Synthetic
tggctggctacggaggggc

SEQ ID NO: 1445 - DNA, 19 bp, Artificial Sequence
  Synthetic
ggctggctacggaggggcg

SEQ ID NO: 1446 - DNA, 19 bp, Artificial Sequence
  Synthetic
gctggctacggaggggcgt

SEQ ID NO: 1447 - DNA, 19 bp, Artificial Sequence
  Synthetic
ctggctacggaggggcgtg

SEQ ID NO: 1448 - DNA, 19 bp, Artificial Sequence
  Synthetic
tggctacggaggggcgtgt

SEQ ID NO: 1449 - DNA, 19 bp, Artificial Sequence
  Synthetic
ggctacggaggggcgtgtc

SEQ ID NO: 1450 - DNA, 19 bp, Artificial Sequence
  Synthetic
gctacggaggggcgtgtct

SEQ ID NO: 1451 - DNA, 19 bp, Artificial Sequence
  Synthetic
ctacggaggggcgtgtctc

SEQ ID NO: 1452 - DNA, 19 bp, Artificial Sequence
  Synthetic
tacggaggggcgtgtctcc

SEQ ID NO: 1453 - DNA, 19 bp, Artificial Sequence
  Synthetic
acggaggggcgtgtctccg

SEQ ID NO: 1454 - DNA, 19 bp, Artificial Sequence
  Synthetic
cggaggggcgtgtctccgc

SEQ ID NO: 1455 - DNA, 19 bp, Artificial Sequence
  Synthetic
ggaggggcgtgtctccgcc

SEQ ID NO: 1456 - DNA, 19 bp, Artificial Sequence
  Synthetic
gaggggcgtgtctccgccc

SEQ ID NO: 1457 - DNA, 19 bp, Artificial Sequence
  Synthetic
aggggcgtgtctccgcccc

SEQ ID NO: 1458 - DNA, 19 bp, Artificial Sequence
  Synthetic
ggggcgtgtctccgccccg

SEQ ID NO: 1459 - DNA, 19 bp, Artificial Sequence
  Synthetic
gggcgtgtctccgccccgc

SEQ ID NO: 1460 - DNA, 19 bp, Artificial Sequence
  Synthetic
ggcgtgtctccgccccgcc

SEQ ID NO: 1461 - DNA, 19 bp, Artificial Sequence
  Synthetic
gcgtgtctccgccccgccc

SEQ ID NO: 1462 - DNA, 19 bp, Artificial Sequence
  Synthetic
cgtgtctccgccccgcccc

SEQ ID NO: 1463 - DNA, 19 bp, Artificial Sequence
  Synthetic
gtgtctccgccccgccccc

SEQ ID NO: 1464 - DNA, 19 bp, Artificial Sequence
  Synthetic
tgtctccgccccgccccct

SEQ ID NO: 1465 - DNA, 19 bp, Artificial Sequence
  Synthetic
gtctccgccccgccccctc

SEQ ID NO: 1466 - DNA, 19 bp, Artificial Sequence
  Synthetic
tctccgccccgccccctcc

SEQ ID NO: 1467 - DNA, 19 bp, Artificial Sequence
  Synthetic
ctccgccccgccccctcca

SEQ ID NO: 1468 - DNA, 19 bp, Artificial Sequence
  Synthetic
tccgccccgccccctccac

SEQ ID NO: 1469 - DNA, 19 bp, Artificial Sequence
  Synthetic
ccgccccgccccctccacc

SEQ ID NO: 1470 - DNA, 19 bp, Artificial Sequence
  Synthetic
cgccccgccccctccaccg

SEQ ID NO: 1471 - DNA, 19 bp, Artificial Sequence
  Synthetic
gccccgccccctccaccgg

SEQ ID NO: 1472 - DNA, 19 bp, Artificial Sequence
  Synthetic
ccccgccccctccaccggg

SEQ ID NO: 1473 - DNA, 19 bp, Artificial Sequence
  Synthetic
cccgccccctccaccgggc

SEQ ID NO: 1474 - DNA, 19 bp, Artificial Sequence
  Synthetic
ccgccccctccaccgggct

SEQ ID NO: 1475 - DNA, 19 bp, Artificial Sequence
  Synthetic
cgccccctccaccgggctg

SEQ ID NO: 1476 - DNA, 19 bp, Artificial Sequence
  Synthetic
gccccctccaccgggctga

SEQ ID NO: 1477 - DNA, 19 bp, Artificial Sequence
  Synthetic
ccccctccaccgggctgac

SEQ ID NO: 1478 - DNA, 19 bp, Artificial Sequence
  Synthetic
cccctccaccgggctgacc

SEQ ID NO: 1479 - DNA, 19 bp, Artificial Sequence
  Synthetic
ccctccaccgggctgaccg

SEQ ID NO: 1480 - DNA, 19 bp, Artificial Sequence
  Synthetic
cctccaccgggctgaccgg

SEQ ID NO: 1481 - DNA, 19 bp, Artificial Sequence
  Synthetic
ctccaccgggctgaccggc

SEQ ID NO: 1482 - DNA, 19 bp, Artificial Sequence
  Synthetic
tccaccgggctgaccggcc

SEQ ID NO: 1483 - DNA, 19 bp, Artificial Sequence
  Synthetic
ccaccgggctgaccggcct

SEQ ID NO: 1484 - DNA, 19 bp, Artificial Sequence
  Synthetic
caccgggctgaccggcctg

SEQ ID NO: 1485 - DNA, 19 bp, Artificial Sequence
  Synthetic
accgggctgaccggcctgg

SEQ ID NO: 1486 - DNA, 19 bp, Artificial Sequence
  Synthetic
ccgggctgaccggcctggg

SEQ ID NO: 1487 - DNA, 19 bp, Artificial Sequence
  Synthetic
cgggctgaccggcctggga

SEQ ID NO: 1488 - DNA, 19 bp, Artificial Sequence
  Synthetic
gggctgaccggcctgggat

SEQ ID NO: 1489 - DNA, 19 bp, Artificial Sequence
  Synthetic
ggctgaccggcctgggatt

SEQ ID NO: 1490 - DNA, 19 bp, Artificial Sequence
  Synthetic
gctgaccggcctgggattc

SEQ ID NO: 1491 - DNA, 19 bp, Artificial Sequence
  Synthetic
ctgaccggcctgggattcc

SEQ ID NO: 1492 - DNA, 19 bp, Artificial Sequence
  Synthetic
tgaccggcctgggattcct

SEQ ID NO: 1493 - DNA, 19 bp, Artificial Sequence
  Synthetic
gaccggcctgggattcctg

SEQ ID NO: 1494 - DNA, 19 bp, Artificial Sequence
  Synthetic
accggcctgggattcctgc

SEQ ID NO: 1495 - DNA, 19 bp, Artificial Sequence
  Synthetic
ccggcctgggattcctgcc

SEQ ID NO: 1496 - DNA, 19 bp, Artificial Sequence
  Synthetic
cggcctgggattcctgcct

SEQ ID NO: 1497 - DNA, 19 bp, Artificial Sequence
  Synthetic
ggcctgggattcctgcctt

SEQ ID NO: 1498 - DNA, 19 bp, Artificial Sequence
  Synthetic
gcctgggattcctgccttc

SEQ ID NO: 1499 - DNA, 19 bp, Artificial Sequence
  Synthetic
cctgggattcctgccttct

SEQ ID NO: 1500 - DNA, 19 bp, Artificial Sequence
  Synthetic
ctgggattcctgccttcta

SEQ ID NO: 1501 - DNA, 19 bp, Artificial Sequence
  Synthetic
tgggattcctgccttctag

SEQ ID NO: 1502 - DNA, 19 bp, Artificial Sequence
  Synthetic
gggattcctgccttctagg

SEQ ID NO: 1503 - DNA, 19 bp, Artificial Sequence
  Synthetic
ggattcctgccttctaggt

SEQ ID NO: 1504 - DNA, 19 bp, Artificial Sequence
  Synthetic
gattcctgccttctaggtc

SEQ ID NO: 1505 - DNA, 19 bp, Artificial Sequence
  Synthetic
attcctgccttctaggtct

SEQ ID NO: 1506 - DNA, 19 bp, Artificial Sequence
  Synthetic
ttcctgccttctaggtcta

SEQ ID NO: 1507 - DNA, 19 bp, Artificial Sequence
  Synthetic
tcctgccttctaggtctag

SEQ ID NO: 1508 - DNA, 19 bp, Artificial Sequence
  Synthetic
cctgccttctaggtctagg

SEQ ID NO: 1509 - DNA, 19 bp, Artificial Sequence
  Synthetic
ctgccttctaggtctaggc

SEQ ID NO: 1510 - DNA, 19 bp, Artificial Sequence
  Synthetic
tgccttctaggtctaggcc

SEQ ID NO: 1511 - DNA, 19 bp, Artificial Sequence
  Synthetic
gccttctaggtctaggccc

SEQ ID NO: 1512 - DNA, 19 bp, Artificial Sequence
  Synthetic
ccttctaggtctaggcccg

SEQ ID NO: 1513 - DNA, 19 bp, Artificial Sequence
  Synthetic
cttctaggtctaggcccgg

SEQ ID NO: 1514 - DNA, 19 bp, Artificial Sequence
  Synthetic
ttctaggtctaggcccggt

SEQ ID NO: 1515 - DNA, 19 bp, Artificial Sequence
  Synthetic
tctaggtctaggcccggtg

SEQ ID NO: 1516 - DNA, 19 bp, Artificial Sequence
  Synthetic
ctaggtctaggcccggtga

SEQ ID NO: 1517 - DNA, 19 bp, Artificial Sequence
  Synthetic
taggtctaggcccggtgag

SEQ ID NO: 1518 - DNA, 19 bp, Artificial Sequence
  Synthetic
aggtctaggcccggtgaga

SEQ ID NO: 1519 - DNA, 19 bp, Artificial Sequence
  Synthetic
ggtctaggcccggtgagag

SEQ ID NO: 1520 - DNA, 19 bp, Artificial Sequence
  Synthetic
gtctaggcccggtgagaga

SEQ ID NO: 1521 - DNA, 19 bp, Artificial Sequence
  Synthetic
tctaggcccggtgagagac

SEQ ID NO: 1522 - DNA, 19 bp, Artificial Sequence
  Synthetic
ctaggcccggtgagagact

SEQ ID NO: 1523 - DNA, 19 bp, Artificial Sequence
  Synthetic
taggcccggtgagagactc

SEQ ID NO: 1524 - DNA, 19 bp, Artificial Sequence
  Synthetic
aggcccggtgagagactcc

SEQ ID NO: 1525 - DNA, 19 bp, Artificial Sequence
  Synthetic
ggcccggtgagagactcca

SEQ ID NO: 1526 - DNA, 19 bp, Artificial Sequence
  Synthetic
gcccggtgagagactccac

SEQ ID NO: 1527 - DNA, 19 bp, Artificial Sequence
  Synthetic
cccggtgagagactccaca

SEQ ID NO: 1528 - DNA, 19 bp, Artificial Sequence
  Synthetic
ccggtgagagactccacac

SEQ ID NO: 1529 - DNA, 19 bp, Artificial Sequence
  Synthetic
cggtgagagactccacacc

SEQ ID NO: 1530 - DNA, 19 bp, Artificial Sequence
  Synthetic
ggtgagagactccacaccg

SEQ ID NO: 1531 - DNA, 19 bp, Artificial Sequence
  Synthetic
gtgagagactccacaccgc

SEQ ID NO: 1532 - DNA, 19 bp, Artificial Sequence
  Synthetic
tgagagactccacaccgcg

SEQ ID NO: 1533 - DNA, 19 bp, Artificial Sequence
  Synthetic
gagagactccacaccgcgg

SEQ ID NO: 1534 - DNA, 19 bp, Artificial Sequence
  Synthetic
agagactccacaccgcgga

SEQ ID NO: 1535 - DNA, 19 bp, Artificial Sequence
  Synthetic
gagactccacaccgcggag

SEQ ID NO: 1536 - DNA, 19 bp, Artificial Sequence
  Synthetic
agactccacaccgcggaga

SEQ ID NO: 1537 - DNA, 19 bp, Artificial Sequence
  Synthetic
gactccacaccgcggagaa

SEQ ID NO: 1538 - DNA, 19 bp, Artificial Sequence
  Synthetic
actccacaccgcggagaac

SEQ ID NO: 1539 - DNA, 19 bp, Artificial Sequence
  Synthetic
ctccacaccgcggagaact

SEQ ID NO: 1540 - DNA, 19 bp, Artificial Sequence
  Synthetic
tccacaccgcggagaactg

SEQ ID NO: 1541 - DNA, 19 bp, Artificial Sequence
  Synthetic
ccacaccgcggagaactgc

SEQ ID NO: 1542 - DNA, 19 bp, Artificial Sequence
  Synthetic
cacaccgcggagaactgcc

SEQ ID NO: 1543 - DNA, 19 bp, Artificial Sequence
  Synthetic
acaccgcggagaactgcca

SEQ ID NO: 1544 - DNA, 19 bp, Artificial Sequence
  Synthetic
caccgcggagaactgccat

SEQ ID NO: 1545 - DNA, 19 bp, Artificial Sequence
  Synthetic
accgcggagaactgccatt

SEQ ID NO: 1546 - DNA, 19 bp, Artificial Sequence
  Synthetic
ccgcggagaactgccattc

SEQ ID NO: 1547 - DNA, 19 bp, Artificial Sequence
  Synthetic
cgcggagaactgccattct

SEQ ID NO: 1548 - DNA, 19 bp, Artificial Sequence
  Synthetic
gcggagaactgccattctt

SEQ ID NO: 1549 - DNA, 19 bp, Artificial Sequence
  Synthetic
cggagaactgccattcttt

SEQ ID NO: 1550 - DNA, 19 bp, Artificial Sequence
  Synthetic
ggagaactgccattctttc

SEQ ID NO: 1551 - DNA, 19 bp, Artificial Sequence
  Synthetic
gagaactgccattctttcc

SEQ ID NO: 1552 - DNA, 19 bp, Artificial Sequence
  Synthetic
agaactgccattctttcct

SEQ ID NO: 1553 - DNA, 19 bp, Artificial Sequence
  Synthetic
gaactgccattctttcctg

SEQ ID NO: 1554 - DNA, 19 bp, Artificial Sequence
  Synthetic
aactgccattctttcctgg

SEQ ID NO: 1555 - DNA, 19 bp, Artificial Sequence
  Synthetic
actgccattctttcctggg

SEQ ID NO: 1556 - DNA, 19 bp, Artificial Sequence
  Synthetic
ctgccattctttcctgggc

SEQ ID NO: 1557 - DNA, 19 bp, Artificial Sequence
  Synthetic
tgccattctttcctgggca

SEQ ID NO: 1558 - DNA, 19 bp, Artificial Sequence
  Synthetic
gccattctttcctgggcat

SEQ ID NO: 1559 - DNA, 19 bp, Artificial Sequence
  Synthetic
ccattctttcctgggcatc

SEQ ID NO: 1560 - DNA, 19 bp, Artificial Sequence
  Synthetic
cattctttcctgggcatcc

SEQ ID NO: 1561 - DNA, 19 bp, Artificial Sequence
  Synthetic
attctttcctgggcatccc

SEQ ID NO: 1562 - DNA, 19 bp, Artificial Sequence
  Synthetic
ttctttcctgggcatcccg

SEQ ID NO: 1563 - DNA, 19 bp, Artificial Sequence
  Synthetic
tctttcctgggcatcccgg

SEQ ID NO: 1564 - DNA, 19 bp, Artificial Sequence
  Synthetic
ctttcctgggcatcccggg

SEQ ID NO: 1565 - DNA, 19 bp, Artificial Sequence
  Synthetic
tttcctgggcatcccgggg

SEQ ID NO: 1566 - DNA, 19 bp, Artificial Sequence
  Synthetic
ttcctgggcatcccgggga

SEQ ID NO: 1567 - DNA, 19 bp, Artificial Sequence
  Synthetic
tcctgggcatcccggggat

SEQ ID NO: 1568 - DNA, 19 bp, Artificial Sequence
  Synthetic
cctgggcatcccggggatc

SEQ ID NO: 1569 - DNA, 19 bp, Artificial Sequence
  Synthetic
ctgggcatcccggggatcc

SEQ ID NO: 1570 - DNA, 19 bp, Artificial Sequence
  Synthetic
tgggcatcccggggatccc

SEQ ID NO: 1571 - DNA, 19 bp, Artificial Sequence
  Synthetic
gggcatcccggggatccca

SEQ ID NO: 1572 - DNA, 19 bp, Artificial Sequence
  Synthetic
ggcatcccggggatcccag

SEQ ID NO: 1573 - DNA, 19 bp, Artificial Sequence
  Synthetic
gcatcccggggatcccaga

SEQ ID NO: 1574 - DNA, 19 bp, Artificial Sequence
  Synthetic
ctccctgtggatcctatag

SEQ ID NO: 1575 - DNA, 19 bp, Artificial Sequence
  Synthetic
agggtgtcgggagggccat

SEQ ID NO: 1576 - DNA, 19 bp, Artificial Sequence
  Synthetic
gagggtgtcgggagggcca

SEQ ID NO: 1577 - DNA, 19 bp, Artificial Sequence
  Synthetic
cgagggtgtcgggagggcc

SEQ ID NO: 1578 - DNA, 19 bp, Artificial Sequence
  Synthetic
ccgagggtgtcgggagggc

SEQ ID NO: 1579 - DNA, 19 bp, Artificial Sequence
  Synthetic
tccgagggtgtcgggaggg

SEQ ID NO: 1580 - DNA, 19 bp, Artificial Sequence
  Synthetic
gtccgagggtgtcgggagg

SEQ ID NO: 1581 - DNA, 19 bp, Artificial Sequence
  Synthetic
tgtccgagggtgtcgggag

SEQ ID NO: 1582 - DNA, 19 bp, Artificial Sequence
  Synthetic
ctgtccgagggtgtcggga

SEQ ID NO: 1583 - DNA, 19 bp, Artificial Sequence
  Synthetic
gctgtccgagggtgtcggg

SEQ ID NO: 1584 - DNA, 19 bp, Artificial Sequence
  Synthetic
tgctgtccgagggtgtcgg

SEQ ID NO: 1585 - DNA, 19 bp, Artificial Sequence
  Synthetic
gtgctgtccgagggtgtcg

SEQ ID NO: 1586 - DNA, 19 bp, Artificial Sequence
  Synthetic
ggtgctgtccgagggtgtc

SEQ ID NO: 1587 - DNA, 19 bp, Artificial Sequence
  Synthetic
gggtgctgtccgagggtgt

SEQ ID NO: 1588 - DNA, 19 bp, Artificial Sequence
  Synthetic
agggtgctgtccgagggtg

SEQ ID NO: 1589 - DNA, 19 bp, Artificial Sequence
  Synthetic
gagggtgctgtccgagggt

SEQ ID NO: 1590 - DNA, 19 bp, Artificial Sequence
  Synthetic
ggagggtgctgtccgaggg

SEQ ID NO: 1591 - DNA, 19 bp, Artificial Sequence
  Synthetic
gggagggtgctgtccgagg

SEQ ID NO: 1592 - DNA, 19 bp, Artificial Sequence
  Synthetic
ggggagggtgctgtccgag

SEQ ID NO: 1593 - DNA, 19 bp, Artificial Sequence
  Synthetic
cggggagggtgctgtccga

SEQ ID NO: 1594 - DNA, 19 bp, Artificial Sequence
  Synthetic
gcggggagggtgctgtccg

SEQ ID NO: 1595 - DNA, 19 bp, Artificial Sequence
  Synthetic
cgcggggagggtgctgtcc

SEQ ID NO: 1596 - DNA, 19 bp, Artificial Sequence
  Synthetic
ccgcggggagggtgctgtc

SEQ ID NO: 1597 - DNA, 19 bp, Artificial Sequence
  Synthetic
tccgcggggagggtgctgt

SEQ ID NO: 1598 - DNA, 19 bp, Artificial Sequence
  Synthetic
ttccgcggggagggtgctg

SEQ ID NO: 1599 - DNA, 19 bp, Artificial Sequence
  Synthetic
cttccgcggggagggtgct

SEQ ID NO: 1600 - DNA, 19 bp, Artificial Sequence
  Synthetic
gcttccgcggggagggtgc

SEQ ID NO: 1601 - DNA, 19 bp, Artificial Sequence
  Synthetic
ggcttccgcggggagggtg

SEQ ID NO: 1602 - DNA, 19 bp, Artificial Sequence
  Synthetic
gggcttccgcggggagggt

SEQ ID NO: 1603 - DNA, 19 bp, Artificial Sequence
  Synthetic
cgggcttccgcggggaggg

SEQ ID NO: 1604 - DNA, 19 bp, Artificial Sequence
  Synthetic
ccgggcttccgcggggagg

SEQ ID NO: 1605 - DNA, 19 bp, Artificial Sequence
  Synthetic
cccgggcttccgcggggag

SEQ ID NO: 1606 - DNA, 19 bp, Artificial Sequence
  Synthetic
ccccgggcttccgcgggga

SEQ ID NO: 1607 - DNA, 19 bp, Artificial Sequence
  Synthetic
tccccgggcttccgcgggg

SEQ ID NO: 1608 - DNA, 19 bp, Artificial Sequence
  Synthetic
gtccccgggcttccgcggg

SEQ ID NO: 1609 - DNA, 19 bp, Artificial Sequence
  Synthetic
cgtccccgggcttccgcgg

SEQ ID NO: 1610 - DNA, 19 bp, Artificial Sequence
  Synthetic
tcgtccccgggcttccgcg

SEQ ID NO: 1611 - DNA, 19 bp, Artificial Sequence
  Synthetic
ctcgtccccgggcttccgc

SEQ ID NO: 1612 - DNA, 19 bp, Artificial Sequence
  Synthetic
cctcgtccccgggcttccg

SEQ ID NO: 1613 - DNA, 19 bp, Artificial Sequence
  Synthetic
tcctcgtccccgggcttcc

SEQ ID NO: 1614 - DNA, 19 bp, Artificial Sequence
  Synthetic
gtcctcgtccccgggcttc

SEQ ID NO: 1615 - DNA, 19 bp, Artificial Sequence
  Synthetic
cgtcctcgtccccgggctt

SEQ ID NO: 1616 - DNA, 19 bp, Artificial Sequence
  Synthetic
ccgtcctcgtccccgggct

SEQ ID NO: 1617 - DNA, 19 bp, Artificial Sequence
  Synthetic
gccgtcctcgtccccgggc

SEQ ID NO: 1618 - DNA, 19 bp, Artificial Sequence
  Synthetic
cgccgtcctcgtccccggg

SEQ ID NO: 1619 - DNA, 19 bp, Artificial Sequence
  Synthetic
tcgccgtcctcgtccccgg

SEQ ID NO: 1620 - DNA, 19 bp, Artificial Sequence
  Synthetic
gtcgccgtcctcgtccccg

SEQ ID NO: 1621 - DNA, 19 bp, Artificial Sequence
  Synthetic
cgtcgccgtcctcgtcccc

SEQ ID NO: 1622 - DNA, 19 bp, Artificial Sequence
  Synthetic
ccgtcgccgtcctcgtccc

SEQ ID NO: 1623 - DNA, 19 bp, Artificial Sequence
  Synthetic
tccgtcgccgtcctcgtcc

SEQ ID NO: 1624 - DNA, 19 bp, Artificial Sequence
  Synthetic
ctccgtcgccgtcctcgtc

SEQ ID NO: 1625 - DNA, 19 bp, Artificial Sequence
  Synthetic
tctccgtcgccgtcctcgt

SEQ ID NO: 1626 - DNA, 19 bp, Artificial Sequence
  Synthetic
gtctccgtcgccgtcctcg

SEQ ID NO: 1627 - DNA, 19 bp, Artificial Sequence
  Synthetic
agtctccgtcgccgtcctc

SEQ ID NO: 1628 - DNA, 19 bp, Artificial Sequence
  Synthetic
gagtctccgtcgccgtcct

SEQ ID NO: 1629 - DNA, 19 bp, Artificial Sequence
  Synthetic
cgagtctccgtcgccgtcc

SEQ ID NO: 1630 - DNA, 19 bp, Artificial Sequence
  Synthetic
acgagtctccgtcgccgtc

SEQ ID NO: 1631 - DNA, 19 bp, Artificial Sequence
  Synthetic
aacgagtctccgtcgccgt

SEQ ID NO: 1632 - DNA, 19 bp, Artificial Sequence
  Synthetic
aaacgagtctccgtcgccg

SEQ ID NO: 1633 - DNA, 19 bp, Artificial Sequence
  Synthetic
caaacgagtctccgtcgcc

SEQ ID NO: 1634 - DNA, 19 bp, Artificial Sequence
  Synthetic
ccaaacgagtctccgtcgc

SEQ ID NO: 1635 - DNA, 19 bp, Artificial Sequence
  Synthetic
tccaaacgagtctccgtcg

SEQ ID NO: 1636 - DNA, 19 bp, Artificial Sequence
  Synthetic
gtccaaacgagtctccgtc

SEQ ID NO: 1637 - DNA, 19 bp, Artificial Sequence
  Synthetic
ggtccaaacgagtctccgt

SEQ ID NO: 1638 - DNA, 19 bp, Artificial Sequence
  Synthetic
gggtccaaacgagtctccg

SEQ ID NO: 1639 - DNA, 19 bp, Artificial Sequence
  Synthetic
ggggtccaaacgagtctcc

SEQ ID NO: 1640 - DNA, 19 bp, Artificial Sequence
  Synthetic
cggggtccaaacgagtctc

SEQ ID NO: 1641 - DNA, 19 bp, Artificial Sequence
  Synthetic
tcggggtccaaacgagtct

SEQ ID NO: 1642 - DNA, 19 bp, Artificial Sequence
  Synthetic
ctcggggtccaaacgagtc

SEQ ID NO: 1643 - DNA, 19 bp, Artificial Sequence
  Synthetic
gctcggggtccaaacgagt

SEQ ID NO: 1644 - DNA, 19 bp, Artificial Sequence
  Synthetic
ggctcggggtccaaacgag

SEQ ID NO: 1645 - DNA, 19 bp, Artificial Sequence
  Synthetic
tggctcggggtccaaacga

SEQ ID NO: 1646 - DNA, 19 bp, Artificial Sequence
  Synthetic
ttggctcggggtccaaacg

SEQ ID NO: 1647 - DNA, 19 bp, Artificial Sequence
  Synthetic
tttggctcggggtccaaac

SEQ ID NO: 1648 - DNA, 19 bp, Artificial Sequence
  Synthetic
ctttggctcggggtccaaa

SEQ ID NO: 1649 - DNA, 19 bp, Artificial Sequence
  Synthetic
gctttggctcggggtccaa

SEQ ID NO: 1650 - DNA, 19 bp, Artificial Sequence
  Synthetic
cgctttggctcggggtcca

SEQ ID NO: 1651 - DNA, 19 bp, Artificial Sequence
  Synthetic
tcgctttggctcggggtcc

SEQ ID NO: 1652 - DNA, 19 bp, Artificial Sequence
  Synthetic
ctcgctttggctcggggtc

SEQ ID NO: 1653 - DNA, 19 bp, Artificial Sequence
  Synthetic
cctcgctttggctcggggt

SEQ ID NO: 1654 - DNA, 19 bp, Artificial Sequence
  Synthetic
gcctcgctttggctcgggg

SEQ ID NO: 1655 - DNA, 19 bp, Artificial Sequence
  Synthetic
ggcctcgctttggctcggg

SEQ ID NO: 1656 - DNA, 19 bp, Artificial Sequence
  Synthetic
gggcctcgctttggctcgg

SEQ ID NO: 1657 - DNA, 19 bp, Artificial Sequence
  Synthetic
agggcctcgctttggctcg

SEQ ID NO: 1658 - DNA, 19 bp, Artificial Sequence
  Synthetic
cagggcctcgctttggctc

SEQ ID NO: 1659 - DNA, 19 bp, Artificial Sequence
  Synthetic
gcagggcctcgctttggct

SEQ ID NO: 1660 - DNA, 19 bp, Artificial Sequence
  Synthetic
cgcagggcctcgctttggc

SEQ ID NO: 1661 - DNA, 19 bp, Artificial Sequence
  Synthetic
tcgcagggcctcgctttgg

SEQ ID NO: 1662 - DNA, 19 bp, Artificial Sequence
  Synthetic
ctcgcagggcctcgctttg

SEQ ID NO: 1663 - DNA, 19 bp, Artificial Sequence
  Synthetic
gctcgcagggcctcgcttt

SEQ ID NO: 1664 - DNA, 19 bp, Artificial Sequence
  Synthetic
ggctcgcagggcctcgctt

SEQ ID NO: 1665 - DNA, 19 bp, Artificial Sequence
  Synthetic
aggctcgcagggcctcgct

SEQ ID NO: 1666 - DNA, 19 bp, Artificial Sequence
  Synthetic
caggctcgcagggcctcgc

SEQ ID NO: 1667 - DNA, 19 bp, Artificial Sequence
  Synthetic
gcaggctcgcagggcctcg

SEQ ID NO: 1668 - DNA, 19 bp, Artificial Sequence
  Synthetic
agcaggctcgcagggcctc

SEQ ID NO: 1669 - DNA, 19 bp, Artificial Sequence
  Synthetic
aagcaggctcgcagggcct

SEQ ID NO: 1670 - DNA, 19 bp, Artificial Sequence
  Synthetic
aaagcaggctcgcagggcc

SEQ ID NO: 1671 - DNA, 19 bp, Artificial Sequence
  Synthetic
caaagcaggctcgcagggc

SEQ ID NO: 1672 - DNA, 19 bp, Artificial Sequence
  Synthetic
tcaaagcaggctcgcaggg

SEQ ID NO: 1673 - DNA, 19 bp, Artificial Sequence
  Synthetic
ctcaaagcaggctcgcagg

SEQ ID NO: 1674 - DNA, 19 bp, Artificial Sequence
  Synthetic
gctcaaagcaggctcgcag

SEQ ID NO: 1675 - DNA, 19 bp, Artificial Sequence
  Synthetic
cgctcaaagcaggctcgca

SEQ ID NO: 1676 - DNA, 19 bp, Artificial Sequence
  Synthetic
ccgctcaaagcaggctcgc

SEQ ID NO: 1677 - DNA, 19 bp, Artificial Sequence
  Synthetic
tccgctcaaagcaggctcg

SEQ ID NO: 1678 - DNA, 19 bp, Artificial Sequence
  Synthetic
ttccgctcaaagcaggctc

SEQ ID NO: 1679 - DNA, 19 bp, Artificial Sequence
  Synthetic
gttccgctcaaagcaggct

SEQ ID NO: 1680 - DNA, 19 bp, Artificial Sequence
  Synthetic
ggttccgctcaaagcaggc

SEQ ID NO: 1681 - DNA, 19 bp, Artificial Sequence
  Synthetic
gggttccgctcaaagcagg

SEQ ID NO: 1682 - DNA, 19 bp, Artificial Sequence
  Synthetic
cgggttccgctcaaagcag

SEQ ID NO: 1683 - DNA, 19 bp, Artificial Sequence
  Synthetic
acgggttccgctcaaagca

SEQ ID NO: 1684 - DNA, 19 bp, Artificial Sequence
  Synthetic
tacgggttccgctcaaagc

SEQ ID NO: 1685 - DNA, 19 bp, Artificial Sequence
  Synthetic
gtacgggttccgctcaaag

SEQ ID NO: 1686 - DNA, 19 bp, Artificial Sequence
  Synthetic
ggtacgggttccgctcaaa

SEQ ID NO: 1687 - DNA, 19 bp, Artificial Sequence
  Synthetic
gggtacgggttccgctcaa

SEQ ID NO: 1688 - DNA, 19 bp, Artificial Sequence
  Synthetic
cgggtacgggttccgctca

SEQ ID NO: 1689 - DNA, 19 bp, Artificial Sequence
  Synthetic
ccgggtacgggttccgctc

SEQ ID NO: 1690 - DNA, 19 bp, Artificial Sequence
  Synthetic
cccgggtacgggttccgct

SEQ ID NO: 1691 - DNA, 19 bp, Artificial Sequence
  Synthetic
gcccgggtacgggttccgc

SEQ ID NO: 1692 - DNA, 19 bp, Artificial Sequence
  Synthetic
tgcccgggtacgggttccg

SEQ ID NO: 1693 - DNA, 19 bp, Artificial Sequence
  Synthetic
atgcccgggtacgggttcc

SEQ ID NO: 1694 - DNA, 19 bp, Artificial Sequence
  Synthetic
gatgcccgggtacgggttc

SEQ ID NO: 1695 - DNA, 19 bp, Artificial Sequence
  Synthetic
cgatgcccgggtacgggtt

SEQ ID NO: 1696 - DNA, 19 bp, Artificial Sequence
  Synthetic
gcgatgcccgggtacgggt

SEQ ID NO: 1697 - DNA, 19 bp, Artificial Sequence
  Synthetic
ggcgatgcccgggtacggg

SEQ ID NO: 1698 - DNA, 19 bp, Artificial Sequence
  Synthetic
tggcgatgcccgggtacgg

SEQ ID NO: 1699 - DNA, 19 bp, Artificial Sequence
  Synthetic
gtggcgatgcccgggtacg

SEQ ID NO: 1700 - DNA, 19 bp, Artificial Sequence
  Synthetic
ggtggcgatgcccgggtac

SEQ ID NO: 1701 - DNA, 19 bp, Artificial Sequence
  Synthetic
tggtggcgatgcccgggta

SEQ ID NO: 1702 - DNA, 19 bp, Artificial Sequence
  Synthetic
ctggtggcgatgcccgggt

SEQ ID NO: 1703 - DNA, 19 bp, Artificial Sequence
  Synthetic
tctggtggcgatgcccggg

SEQ ID NO: 1704 - DNA, 19 bp, Artificial Sequence
  Synthetic
ctctggtggcgatgcccgg

SEQ ID NO: 1705 - DNA, 19 bp, Artificial Sequence
  Synthetic
tctctggtggcgatgcccg

SEQ ID NO: 1706 - DNA, 19 bp, Artificial Sequence
  Synthetic
ttctctggtggcgatgccc

SEQ ID NO: 1707 - DNA, 19 bp, Artificial Sequence
  Synthetic
gttctctggtggcgatgcc

SEQ ID NO: 1708 - DNA, 19 bp, Artificial Sequence
  Synthetic
cgttctctggtggcgatgc

SEQ ID NO: 1709 - DNA, 19 bp, Artificial Sequence
  Synthetic
ccgttctctggtggcgatg

SEQ ID NO: 1710 - DNA, 19 bp, Artificial Sequence
  Synthetic
gccgttctctggtggcgat

SEQ ID NO: 1711 - DNA, 19 bp, Artificial Sequence
  Synthetic
agccgttctctggtggcga

SEQ ID NO: 1712 - DNA, 19 bp, Artificial Sequence
  Synthetic
cagccgttctctggtggcg

SEQ ID NO: 1713 - DNA, 19 bp, Artificial Sequence
  Synthetic
ccagccgttctctggtggc

SEQ ID NO: 1714 - DNA, 19 bp, Artificial Sequence
  Synthetic
gccagccgttctctggtgg

SEQ ID NO: 1715 - DNA, 19 bp, Artificial Sequence
  Synthetic
ggccagccgttctctggtg

SEQ ID NO: 1716 - DNA, 19 bp, Artificial Sequence
  Synthetic
gggccagccgttctctggt

SEQ ID NO: 1717 - DNA, 19 bp, Artificial Sequence
  Synthetic
tgggccagccgttctctgg

SEQ ID NO: 1718 - DNA, 19 bp, Artificial Sequence
  Synthetic
ctgggccagccgttctctg

SEQ ID NO: 1719 - DNA, 19 bp, Artificial Sequence
  Synthetic
cctgggccagccgttctct

SEQ ID NO: 1720 - DNA, 19 bp, Artificial Sequence
  Synthetic
gcctgggccagccgttctc

SEQ ID NO: 1721 - DNA, 19 bp, Artificial Sequence
  Synthetic
ggcctgggccagccgttct

SEQ ID NO: 1722 - DNA, 19 bp, Artificial Sequence
  Synthetic
tggcctgggccagccgttc

SEQ ID NO: 1723 - DNA, 19 bp, Artificial Sequence
  Synthetic
atggcctgggccagccgtt

SEQ ID NO: 1724 - DNA, 19 bp, Artificial Sequence
  Synthetic
gatggcctgggccagccgt

SEQ ID NO: 1725 - DNA, 19 bp, Artificial Sequence
  Synthetic
cgatggcctgggccagccg

SEQ ID NO: 1726 - DNA, 19 bp, Artificial Sequence
  Synthetic
ccgatggcctgggccagcc

SEQ ID NO: 1727 - DNA, 19 bp, Artificial Sequence
  Synthetic
gccgatggcctgggccagc

SEQ ID NO: 1728 - DNA, 19 bp, Artificial Sequence
  Synthetic
tgccgatggcctgggccag

SEQ ID NO: 1729 - DNA, 19 bp, Artificial Sequence
  Synthetic
atgccgatggcctgggcca

SEQ ID NO: 1730 - DNA, 19 bp, Artificial Sequence
  Synthetic
aatgccgatggcctgggcc

SEQ ID NO: 1731 - DNA, 19 bp, Artificial Sequence
  Synthetic
gaatgccgatggcctgggc

SEQ ID NO: 1732 - DNA, 19 bp, Artificial Sequence
  Synthetic
ggaatgccgatggcctggg

SEQ ID NO: 1733 - DNA, 19 bp, Artificial Sequence
  Synthetic
cggaatgccgatggcctgg

SEQ ID NO: 1734 - DNA, 19 bp, Artificial Sequence
  Synthetic
ccggaatgccgatggcctg

SEQ ID NO: 1735 - DNA, 19 bp, Artificial Sequence
  Synthetic
tccggaatgccgatggcct

SEQ ID NO: 1736 - DNA, 19 bp, Artificial Sequence
  Synthetic
ctccggaatgccgatggcc

SEQ ID NO: 1737 - DNA, 19 bp, Artificial Sequence
  Synthetic
gctccggaatgccgatggc

SEQ ID NO: 1738 - DNA, 19 bp, Artificial Sequence
  Synthetic
ggctccggaatgccgatgg

SEQ ID NO: 1739 - DNA, 19 bp, Artificial Sequence
  Synthetic
gggctccggaatgccgatg

SEQ ID NO: 1740 - DNA, 19 bp, Artificial Sequence
  Synthetic
tgggctccggaatgccgat

SEQ ID NO: 1741 - DNA, 19 bp, Artificial Sequence
  Synthetic
ctgggctccggaatgccga

SEQ ID NO: 1742 - DNA, 19 bp, Artificial Sequence
  Synthetic
cctgggctccggaatgccg

SEQ ID NO: 1743 - DNA, 19 bp, Artificial Sequence
  Synthetic
ccctgggctccggaatgcc

SEQ ID NO: 1744 - DNA, 19 bp, Artificial Sequence
  Synthetic
accctgggctccggaatgc

SEQ ID NO: 1745 - DNA, 19 bp, Artificial Sequence
  Synthetic
gaccctgggctccggaatg

SEQ ID NO: 1746 - DNA, 19 bp, Artificial Sequence
  Synthetic
ggaccctgggctccggaat

SEQ ID NO: 1747 - DNA, 19 bp, Artificial Sequence
  Synthetic
tggaccctgggctccggaa

SEQ ID NO: 1748 - DNA, 19 bp, Artificial Sequence
  Synthetic
ctggaccctgggctccgga

SEQ ID NO: 1749 - DNA, 19 bp, Artificial Sequence
  Synthetic
tctggaccctgggctccgg

SEQ ID NO: 1750 - DNA, 19 bp, Artificial Sequence
  Synthetic
atctggaccctgggctccg

SEQ ID NO: 1751 - DNA, 19 bp, Artificial Sequence
  Synthetic
aatctggaccctgggctcc

SEQ ID NO: 1752 - DNA, 19 bp, Artificial Sequence
  Synthetic
aaatctggaccctgggctc

SEQ ID NO: 1753 - DNA, 19 bp, Artificial Sequence
  Synthetic
caaatctggaccctgggct

SEQ ID NO: 1754 - DNA, 19 bp, Artificial Sequence
  Synthetic
ccaaatctggaccctgggc

SEQ ID NO: 1755 - DNA, 19 bp, Artificial Sequence
  Synthetic
accaaatctggaccctggg

SEQ ID NO: 1756 - DNA, 19 bp, Artificial Sequence
  Synthetic
aaccaaatctggaccctgg

SEQ ID NO: 1757 - DNA, 19 bp, Artificial Sequence
  Synthetic
aaaccaaatctggaccctg

SEQ ID NO: 1758 - DNA, 19 bp, Artificial Sequence
  Synthetic
gaaaccaaatctggaccct

SEQ ID NO: 1759 - DNA, 19 bp, Artificial Sequence
  Synthetic
tgaaaccaaatctggaccc

SEQ ID NO: 1760 - DNA, 19 bp, Artificial Sequence
  Synthetic
ctgaaaccaaatctggacc

SEQ ID NO: 1761 - DNA, 19 bp, Artificial Sequence
  Synthetic
tctgaaaccaaatctggac

SEQ ID NO: 1762 - DNA, 19 bp, Artificial Sequence
  Synthetic
ttctgaaaccaaatctgga

SEQ ID NO: 1763 - DNA, 19 bp, Artificial Sequence
  Synthetic
attctgaaaccaaatctgg

SEQ ID NO: 1764 - DNA, 19 bp, Artificial Sequence
  Synthetic
cattctgaaaccaaatctg

SEQ ID NO: 1765 - DNA, 19 bp, Artificial Sequence
  Synthetic
tcattctgaaaccaaatct

SEQ ID NO: 1766 - DNA, 19 bp, Artificial Sequence
  Synthetic
ctcattctgaaaccaaatc

SEQ ID NO: 1767 - DNA, 19 bp, Artificial Sequence
  Synthetic
tctcattctgaaaccaaat

SEQ ID NO: 1768 - DNA, 19 bp, Artificial Sequence
  Synthetic
ctctcattctgaaaccaaa

SEQ ID NO: 1769 - DNA, 19 bp, Artificial Sequence
  Synthetic
cctctcattctgaaaccaa

SEQ ID NO: 1770 - DNA, 19 bp, Artificial Sequence
  Synthetic
acctctcattctgaaacca

SEQ ID NO: 1771 - DNA, 19 bp, Artificial Sequence
  Synthetic
gacctctcattctgaaacc

SEQ ID NO: 1772 - DNA, 19 bp, Artificial Sequence
  Synthetic
tgacctctcattctgaaac

SEQ ID NO: 1773 - DNA, 19 bp, Artificial Sequence
  Synthetic
gtgacctctcattctgaaa

SEQ ID NO: 1774 - DNA, 19 bp, Artificial Sequence
  Synthetic
cgtgacctctcattctgaa

SEQ ID NO: 1775 - DNA, 19 bp, Artificial Sequence
  Synthetic
gcgtgacctctcattctga

SEQ ID NO: 1776 - DNA, 19 bp, Artificial Sequence
  Synthetic
ggcgtgacctctcattctg

SEQ ID NO: 1777 - DNA, 19 bp, Artificial Sequence
  Synthetic
tggcgtgacctctcattct

SEQ ID NO: 1778 - DNA, 19 bp, Artificial Sequence
  Synthetic
ctggcgtgacctctcattc

SEQ ID NO: 1779 - DNA, 19 bp, Artificial Sequence
  Synthetic
gctggcgtgacctctcatt

SEQ ID NO: 1780 - DNA, 19 bp, Artificial Sequence
  Synthetic
agctggcgtgacctctcat

SEQ ID NO: 1781 - DNA, 19 bp, Artificial Sequence
  Synthetic
cagctggcgtgacctctca

SEQ ID NO: 1782 - DNA, 19 bp, Artificial Sequence
  Synthetic
tcagctggcgtgacctctc

SEQ ID NO: 1783 - DNA, 19 bp, Artificial Sequence
  Synthetic
ctcagctggcgtgacctct

SEQ ID NO: 1784 - DNA, 19 bp, Artificial Sequence
  Synthetic
cctcagctggcgtgacctc

SEQ ID NO: 1785 - DNA, 19 bp, Artificial Sequence
  Synthetic
gcctcagctggcgtgacct

SEQ ID NO: 1786 - DNA, 19 bp, Artificial Sequence
  Synthetic
tgcctcagctggcgtgacc

SEQ ID NO: 1787 - DNA, 19 bp, Artificial Sequence
  Synthetic
ctgcctcagctggcgtgac

SEQ ID NO: 1788 - DNA, 19 bp, Artificial Sequence
  Synthetic
gctgcctcagctggcgtga

SEQ ID NO: 1789 - DNA, 19 bp, Artificial Sequence
  Synthetic
tgctgcctcagctggcgtg

SEQ ID NO: 1790 - DNA, 19 bp, Artificial Sequence
  Synthetic
gtgctgcctcagctggcgt

SEQ ID NO: 1791 - DNA, 19 bp, Artificial Sequence
  Synthetic
ggtgctgcctcagctggcg

SEQ ID NO: 1792 - DNA, 19 bp, Artificial Sequence
  Synthetic
cggtgctgcctcagctggc

SEQ ID NO: 1793 - DNA, 19 bp, Artificial Sequence
  Synthetic
ccggtgctgcctcagctgg

SEQ ID NO: 1794 - DNA, 19 bp, Artificial Sequence
  Synthetic
gccggtgctgcctcagctg

SEQ ID NO: 1795 - DNA, 19 bp, Artificial Sequence
  Synthetic
cgccggtgctgcctcagct

SEQ ID NO: 1796 - DNA, 19 bp, Artificial Sequence
  Synthetic
ccgccggtgctgcctcagc

SEQ ID NO: 1797 - DNA, 19 bp, Artificial Sequence
  Synthetic
cccgccggtgctgcctcag

SEQ ID NO: 1798 - DNA, 19 bp, Artificial Sequence
  Synthetic
tcccgccggtgctgcctca

SEQ ID NO: 1799 - DNA, 19 bp, Artificial Sequence
  Synthetic
ttcccgccggtgctgcctc

SEQ ID NO: 1800 - DNA, 19 bp, Artificial Sequence
  Synthetic
attcccgccggtgctgcct

SEQ ID NO: 1801 - DNA, 19 bp, Artificial Sequence
  Synthetic
gattcccgccggtgctgcc

SEQ ID NO: 1802 - DNA, 19 bp, Artificial Sequence
  Synthetic
agattcccgccggtgctgc

SEQ ID NO: 1803 - DNA, 19 bp, Artificial Sequence
  Synthetic
gagattcccgccggtgctg

SEQ ID NO: 1804 - DNA, 19 bp, Artificial Sequence
  Synthetic
cgagattcccgccggtgct

SEQ ID NO: 1805 - DNA, 19 bp, Artificial Sequence
  Synthetic
ccgagattcccgccggtgc

SEQ ID NO: 1806 - DNA, 19 bp, Artificial Sequence
  Synthetic
gccgagattcccgccggtg

SEQ ID NO: 1807 - DNA, 19 bp, Artificial Sequence
  Synthetic
ggccgagattcccgccggt

SEQ ID NO: 1808 - DNA, 19 bp, Artificial Sequence
  Synthetic
gggccgagattcccgccgg

SEQ ID NO: 1809 - DNA, 19 bp, Artificial Sequence
  Synthetic
agggccgagattcccgccg

SEQ ID NO: 1810 - DNA, 19 bp, Artificial Sequence
  Synthetic
cagggccgagattcccgcc

SEQ ID NO: 1811 - DNA, 19 bp, Artificial Sequence
  Synthetic
ccagggccgagattcccgc

SEQ ID NO: 1812 - DNA, 19 bp, Artificial Sequence
  Synthetic
gccagggccgagattcccg

SEQ ID NO: 1813 - DNA, 19 bp, Artificial Sequence
  Synthetic
ggccagggccgagattccc

SEQ ID NO: 1814 - DNA, 19 bp, Artificial Sequence
  Synthetic
gggccagggccgagattcc

SEQ ID NO: 1815 - DNA, 19 bp, Artificial Sequence
  Synthetic
cgggccagggccgagattc

SEQ ID NO: 1816 - DNA, 19 bp, Artificial Sequence
  Synthetic
ccgggccagggccgagatt

SEQ ID NO: 1817 - DNA, 19 bp, Artificial Sequence
  Synthetic
cccgggccagggccgagat

SEQ ID NO: 1818 - DNA, 19 bp, Artificial Sequence
  Synthetic
tcccgggccagggccgaga

SEQ ID NO: 1819 - DNA, 19 bp, Artificial Sequence
  Synthetic
ctcccgggccagggccgag

SEQ ID NO: 1820 - DNA, 19 bp, Artificial Sequence
  Synthetic
tctcccgggccagggccga

SEQ ID NO: 1821 - DNA, 19 bp, Artificial Sequence
  Synthetic
gtctcccgggccagggccg

SEQ ID NO: 1822 - DNA, 19 bp, Artificial Sequence
  Synthetic
cgtctcccgggccagggcc

SEQ ID NO: 1823 - DNA, 19 bp, Artificial Sequence
  Synthetic
gcgtctcccgggccagggc

SEQ ID NO: 1824 - DNA, 19 bp, Artificial Sequence
  Synthetic
cgcgtctcccgggccaggg

SEQ ID NO: 1825 - DNA, 19 bp, Artificial Sequence
  Synthetic
ccgcgtctcccgggccagg

SEQ ID NO: 1826 - DNA, 19 bp, Artificial Sequence
  Synthetic
gccgcgtctcccgggccag

SEQ ID NO: 1827 - DNA, 19 bp, Artificial Sequence
  Synthetic
ggccgcgtctcccgggcca

SEQ ID NO: 1828 - DNA, 19 bp, Artificial Sequence
  Synthetic
gggccgcgtctcccgggcc

SEQ ID NO: 1829 - DNA, 19 bp, Artificial Sequence
  Synthetic
cgggccgcgtctcccgggc

SEQ ID NO: 1830 - DNA, 19 bp, Artificial Sequence
  Synthetic
gcgggccgcgtctcccggg

SEQ ID NO: 1831 - DNA, 19 bp, Artificial Sequence
  Synthetic
ggcgggccgcgtctcccgg

SEQ ID NO: 1832 - DNA, 19 bp, Artificial Sequence
  Synthetic
tggcgggccgcgtctcccg

SEQ ID NO: 1833 - DNA, 19 bp, Artificial Sequence
  Synthetic
ctggcgggccgcgtctccc

SEQ ID NO: 1834 - DNA, 19 bp, Artificial Sequence
  Synthetic
tctggcgggccgcgtctcc

SEQ ID NO: 1835 - DNA, 19 bp, Artificial Sequence
  Synthetic
ttctggcgggccgcgtctc

SEQ ID NO: 1836 - DNA, 19 bp, Artificial Sequence
  Synthetic
cttctggcgggccgcgtct

SEQ ID NO: 1837 - DNA, 19 bp, Artificial Sequence
  Synthetic
ccttctggcgggccgcgtc

SEQ ID NO: 1838 - DNA, 19 bp, Artificial Sequence
  Synthetic
gccttctggcgggccgcgt

SEQ ID NO: 1839 - DNA, 19 bp, Artificial Sequence
  Synthetic
ggccttctggcgggccgcg

SEQ ID NO: 1840 - DNA, 19 bp, Artificial Sequence
  Synthetic
cggccttctggcgggccgc

SEQ ID NO: 1841 - DNA, 19 bp, Artificial Sequence
  Synthetic
ccggccttctggcgggccg

SEQ ID NO: 1842 - DNA, 19 bp, Artificial Sequence
  Synthetic
gccggccttctggcgggcc

SEQ ID NO: 1843 - DNA, 19 bp, Artificial Sequence
  Synthetic
cgccggccttctggcgggc

SEQ ID NO: 1844 - DNA, 19 bp, Artificial Sequence
  Synthetic
tcgccggccttctggcggg

SEQ ID NO: 1845 - DNA, 19 bp, Artificial Sequence
  Synthetic
ttcgccggccttctggcgg

SEQ ID NO: 1846 - DNA, 19 bp, Artificial Sequence
  Synthetic
tttcgccggccttctggcg

SEQ ID NO: 1847 - DNA, 19 bp, Artificial Sequence
  Synthetic
ctttcgccggccttctggc

SEQ ID NO: 1848 - DNA, 19 bp, Artificial Sequence
  Synthetic
gctttcgccggccttctgg

SEQ ID NO: 1849 - DNA, 19 bp, Artificial Sequence
  Synthetic
cgctttcgccggccttctg

SEQ ID NO: 1850 - DNA, 19 bp, Artificial Sequence
  Synthetic
ccgctttcgccggccttct

SEQ ID NO: 1851 - DNA, 19 bp, Artificial Sequence
  Synthetic
tccgctttcgccggccttc

SEQ ID NO: 1852 - DNA, 19 bp, Artificial Sequence
  Synthetic
gtccgctttcgccggcctt

SEQ ID NO: 1853 - DNA, 19 bp, Artificial Sequence
  Synthetic
ggtccgctttcgccggcct

SEQ ID NO: 1854 - DNA, 19 bp, Artificial Sequence
  Synthetic
cggtccgctttcgccggcc

SEQ ID NO: 1855 - DNA, 19 bp, Artificial Sequence
  Synthetic
gcggtccgctttcgccggc

SEQ ID NO: 1856 - DNA, 19 bp, Artificial Sequence
  Synthetic
ggcggtccgctttcgccgg

SEQ ID NO: 1857 - DNA, 19 bp, Artificial Sequence
  Synthetic
cggcggtccgctttcgccg

SEQ ID NO: 1858 - DNA, 19 bp, Artificial Sequence
  Synthetic
acggcggtccgctttcgcc

SEQ ID NO: 1859 - DNA, 19 bp, Artificial Sequence
  Synthetic
gacggcggtccgctttcgc

SEQ ID NO: 1860 - DNA, 19 bp, Artificial Sequence
  Synthetic
tgacggcggtccgctttcg

SEQ ID NO: 1861 - DNA, 19 bp, Artificial Sequence
  Synthetic
gtgacggcggtccgctttc

SEQ ID NO: 1862 - DNA, 19 bp, Artificial Sequence
  Synthetic
ggtgacggcggtccgcttt

SEQ ID NO: 1863 - DNA, 19 bp, Artificial Sequence
  Synthetic
cggtgacggcggtccgctt

SEQ ID NO: 1864 - DNA, 19 bp, Artificial Sequence
  Synthetic
ccggtgacggcggtccgct

SEQ ID NO: 1865 - DNA, 19 bp, Artificial Sequence
  Synthetic
tccggtgacggcggtccgc

SEQ ID NO: 1866 - DNA, 19 bp, Artificial Sequence
  Synthetic
atccggtgacggcggtccg

SEQ ID NO: 1867 - DNA, 19 bp, Artificial Sequence
  Synthetic
gatccggtgacggcggtcc

SEQ ID NO: 1868 - DNA, 19 bp, Artificial Sequence
  Synthetic
ggatccggtgacggcggtc

SEQ ID NO: 1869 - DNA, 19 bp, Artificial Sequence
  Synthetic
gggatccggtgacggcggt

SEQ ID NO: 1870 - DNA, 19 bp, Artificial Sequence
  Synthetic
tgggatccggtgacggcgg

SEQ ID NO: 1871 - DNA, 19 bp, Artificial Sequence
  Synthetic
ctgggatccggtgacggcg

SEQ ID NO: 1872 - DNA, 19 bp, Artificial Sequence
  Synthetic
tctgggatccggtgacggc

SEQ ID NO: 1873 - DNA, 19 bp, Artificial Sequence
  Synthetic
gtctgggatccggtgacgg

SEQ ID NO: 1874 - DNA, 19 bp, Artificial Sequence
  Synthetic
ggtctgggatccggtgacg

SEQ ID NO: 1875 - DNA, 19 bp, Artificial Sequence
  Synthetic
cggtctgggatccggtgac

SEQ ID NO: 1876 - DNA, 19 bp, Artificial Sequence
  Synthetic
gcggtctgggatccggtga

SEQ ID NO: 1877 - DNA, 19 bp, Artificial Sequence
  Synthetic
ggcggtctgggatccggtg

SEQ ID NO: 1878 - DNA, 19 bp, Artificial Sequence
  Synthetic
gggcggtctgggatccggt

SEQ ID NO: 1879 - DNA, 19 bp, Artificial Sequence
  Synthetic
agggcggtctgggatccgg

SEQ ID NO: 1880 - DNA, 19 bp, Artificial Sequence
  Synthetic
cagggcggtctgggatccg

SEQ ID NO: 1881 - DNA, 19 bp, Artificial Sequence
  Synthetic
gcagggcggtctgggatcc

SEQ ID NO: 1882 - DNA, 19 bp, Artificial Sequence
  Synthetic
agcagggcggtctgggatc

SEQ ID NO: 1883 - DNA, 19 bp, Artificial Sequence
  Synthetic
gagcagggcggtctgggat

SEQ ID NO: 1884 - DNA, 19 bp, Artificial Sequence
  Synthetic
ggagcagggcggtctggga

SEQ ID NO: 1885 - DNA, 19 bp, Artificial Sequence
  Synthetic
aggagcagggcggtctggg

SEQ ID NO: 1886 - DNA, 19 bp, Artificial Sequence
  Synthetic
gaggagcagggcggtctgg

SEQ ID NO: 1887 - DNA, 19 bp, Artificial Sequence
  Synthetic
ggaggagcagggcggtctg

SEQ ID NO: 1888 - DNA, 19 bp, Artificial Sequence
  Synthetic
cggaggagcagggcggtct

SEQ ID NO: 1889 - DNA, 19 bp, Artificial Sequence
  Synthetic
tcggaggagcagggcggtc

SEQ ID NO: 1890 - DNA, 19 bp, Artificial Sequence
  Synthetic
ctcggaggagcagggcggt

SEQ ID NO: 1891 - DNA, 19 bp, Artificial Sequence
  Synthetic
gctcggaggagcagggcgg

SEQ ID NO: 1892 - DNA, 19 bp, Artificial Sequence
  Synthetic
ggctcggaggagcagggcg

SEQ ID NO: 1893 - DNA, 19 bp, Artificial Sequence
  Synthetic
aggctcggaggagcagggc

SEQ ID NO: 1894 - DNA, 19 bp, Artificial Sequence
  Synthetic
aaggctcggaggagcaggg

SEQ ID NO: 1895 - DNA, 19 bp, Artificial Sequence
  Synthetic
aaaggctcggaggagcagg

SEQ ID NO: 1896 - DNA, 19 bp, Artificial Sequence
  Synthetic
caaaggctcggaggagcag

SEQ ID NO: 1897 - DNA, 19 bp, Artificial Sequence
  Synthetic
tcaaaggctcggaggagca

SEQ ID NO: 1898 - DNA, 19 bp, Artificial Sequence
  Synthetic
ctcaaaggctcggaggagc

SEQ ID NO: 1899 - DNA, 19 bp, Artificial Sequence
  Synthetic
tctcaaaggctcggaggag

SEQ ID NO: 1900 - DNA, 19 bp, Artificial Sequence
  Synthetic
ttctcaaaggctcggagga

SEQ ID NO: 1901 - DNA, 19 bp, Artificial Sequence
  Synthetic
cttctcaaaggctcggagg

SEQ ID NO: 1902 - DNA, 19 bp, Artificial Sequence
  Synthetic
ccttctcaaaggctcggag

SEQ ID NO: 1903 - DNA, 19 bp, Artificial Sequence
  Synthetic
tccttctcaaaggctcgga

SEQ ID NO: 1904 - DNA, 19 bp, Artificial Sequence
  Synthetic
atccttctcaaaggctcgg

SEQ ID NO: 1905 - DNA, 19 bp, Artificial Sequence
  Synthetic
gatccttctcaaaggctcg

SEQ ID NO: 1906 - DNA, 19 bp, Artificial Sequence
  Synthetic
cgatccttctcaaaggctc

SEQ ID NO: 1907 - DNA, 19 bp, Artificial Sequence
  Synthetic
gcgatccttctcaaaggct

SEQ ID NO: 1908 - DNA, 19 bp, Artificial Sequence
  Synthetic
agcgatccttctcaaaggc

SEQ ID NO: 1909 - DNA, 19 bp, Artificial Sequence
  Synthetic
aagcgatccttctcaaagg

SEQ ID NO: 1910 - DNA, 19 bp, Artificial Sequence
  Synthetic
aaagcgatccttctcaaag

SEQ ID NO: 1911 - DNA, 19 bp, Artificial Sequence
  Synthetic
gaaagcgatccttctcaaa

SEQ ID NO: 1912 - DNA, 19 bp, Artificial Sequence
  Synthetic
ggaaagcgatccttctcaa

SEQ ID NO: 1913 - DNA, 19 bp, Artificial Sequence
  Synthetic
tggaaagcgatccttctca

SEQ ID NO: 1914 - DNA, 19 bp, Artificial Sequence
  Synthetic
ctggaaagcgatccttctc

SEQ ID NO: 1915 - DNA, 19 bp, Artificial Sequence
  Synthetic
cctggaaagcgatccttct

SEQ ID NO: 1916 - DNA, 19 bp, Artificial Sequence
  Synthetic
gcctggaaagcgatccttc

SEQ ID NO: 1917 - DNA, 19 bp, Artificial Sequence
  Synthetic
tgcctggaaagcgatcctt

SEQ ID NO: 1918 - DNA, 19 bp, Artificial Sequence
  Synthetic
atgcctggaaagcgatcct

SEQ ID NO: 1919 - DNA, 19 bp, Artificial Sequence
  Synthetic
gatgcctggaaagcgatcc

SEQ ID NO: 1920 - DNA, 19 bp, Artificial Sequence
  Synthetic
cgatgcctggaaagcgatc

SEQ ID NO: 1921 - DNA, 19 bp, Artificial Sequence
  Synthetic
gcgatgcctggaaagcgat

SEQ ID NO: 1922 - DNA, 19 bp, Artificial Sequence
  Synthetic
ggcgatgcctggaaagcga

SEQ ID NO: 1923 - DNA, 19 bp, Artificial Sequence
  Synthetic
cggcgatgcctggaaagcg

SEQ ID NO: 1924 - DNA, 19 bp, Artificial Sequence
  Synthetic
gcggcgatgcctggaaagc

SEQ ID NO: 1925 - DNA, 19 bp, Artificial Sequence
  Synthetic
ggcggcgatgcctggaaag

SEQ ID NO: 1926 - DNA, 19 bp, Artificial Sequence
  Synthetic
gggcggcgatgcctggaaa

SEQ ID NO: 1927 - DNA, 19 bp, Artificial Sequence
  Synthetic
cgggcggcgatgcctggaa

SEQ ID NO: 1928 - DNA, 19 bp, Artificial Sequence
  Synthetic
ccgggcggcgatgcctgga

SEQ ID NO: 1929 - DNA, 19 bp, Artificial Sequence
  Synthetic
cccgggcggcgatgcctgg

SEQ ID NO: 1930 - DNA, 19 bp, Artificial Sequence
  Synthetic
tcccgggcggcgatgcctg

SEQ ID NO: 1931 - DNA, 19 bp, Artificial Sequence
  Synthetic
ctcccgggcggcgatgcct

SEQ ID NO: 1932 - DNA, 19 bp, Artificial Sequence
  Synthetic
cctcccgggcggcgatgcc

SEQ ID NO: 1933 - DNA, 19 bp, Artificial Sequence
  Synthetic
tcctcccgggcggcgatgc

SEQ ID NO: 1934 - DNA, 19 bp, Artificial Sequence
  Synthetic
ctcctcccgggcggcgatg

SEQ ID NO: 1935 - DNA, 19 bp, Artificial Sequence
  Synthetic
gctcctcccgggcggcgat

SEQ ID NO: 1936 - DNA, 19 bp, Artificial Sequence
  Synthetic
agctcctcccgggcggcga

SEQ ID NO: 1937 - DNA, 19 bp, Artificial Sequence
  Synthetic
cagctcctcccgggcggcg

SEQ ID NO: 1938 - DNA, 19 bp, Artificial Sequence
  Synthetic
ccagctcctcccgggcggc

SEQ ID NO: 1939 - DNA, 19 bp, Artificial Sequence
  Synthetic
gccagctcctcccgggcgg

SEQ ID NO: 1940 - DNA, 19 bp, Artificial Sequence
  Synthetic
ggccagctcctcccgggcg

SEQ ID NO: 1941 - DNA, 19 bp, Artificial Sequence
  Synthetic
tggccagctcctcccgggc

SEQ ID NO: 1942 - DNA, 19 bp, Artificial Sequence
  Synthetic
ctggccagctcctcccggg

SEQ ID NO: 1943 - DNA, 19 bp, Artificial Sequence
  Synthetic
tctggccagctcctcccgg

SEQ ID NO: 1944 - DNA, 19 bp, Artificial Sequence
  Synthetic
ctctggccagctcctcccg

SEQ ID NO: 1945 - DNA, 19 bp, Artificial Sequence
  Synthetic
tctctggccagctcctccc

SEQ ID NO: 1946 - DNA, 19 bp, Artificial Sequence
  Synthetic
ctctctggccagctcctcc

SEQ ID NO: 1947 - DNA, 19 bp, Artificial Sequence
  Synthetic
tctctctggccagctcctc

SEQ ID NO: 1948 - DNA, 19 bp, Artificial Sequence
  Synthetic
gtctctctggccagctcct

SEQ ID NO: 1949 - DNA, 19 bp, Artificial Sequence
  Synthetic
cgtctctctggccagctcc

SEQ ID NO: 1950 - DNA, 19 bp, Artificial Sequence
  Synthetic
ccgtctctctggccagctc

SEQ ID NO: 1951 - DNA, 19 bp, Artificial Sequence
  Synthetic
cccgtctctctggccagct

SEQ ID NO: 1952 - DNA, 19 bp, Artificial Sequence
  Synthetic
gcccgtctctctggccagc

SEQ ID NO: 1953 - DNA, 19 bp, Artificial Sequence
  Synthetic
ggcccgtctctctggccag

SEQ ID NO: 1954 - DNA, 19 bp, Artificial Sequence
  Synthetic
aggcccgtctctctggcca

SEQ ID NO: 1955 - DNA, 19 bp, Artificial Sequence
  Synthetic
gaggcccgtctctctggcc

SEQ ID NO: 1956 - DNA, 19 bp, Artificial Sequence
  Synthetic
ggaggcccgtctctctggc

SEQ ID NO: 1957 - DNA, 19 bp, Artificial Sequence
  Synthetic
gggaggcccgtctctctgg

SEQ ID NO: 1958 - DNA, 19 bp, Artificial Sequence
  Synthetic
cgggaggcccgtctctctg

SEQ ID NO: 1959 - DNA, 19 bp, Artificial Sequence
  Synthetic
ccgggaggcccgtctctct

SEQ ID NO: 1960 - DNA, 19 bp, Artificial Sequence
  Synthetic
tccgggaggcccgtctctc

SEQ ID NO: 1961 - DNA, 19 bp, Artificial Sequence
  Synthetic
ctccgggaggcccgtctct

SEQ ID NO: 1962 - DNA, 19 bp, Artificial Sequence
  Synthetic
actccgggaggcccgtctc

SEQ ID NO: 1963 - DNA, 19 bp, Artificial Sequence
  Synthetic
gactccgggaggcccgtct

SEQ ID NO: 1964 - DNA, 19 bp, Artificial Sequence
  Synthetic
ggactccgggaggcccgtc

SEQ ID NO: 1965 - DNA, 19 bp, Artificial Sequence
  Synthetic
tggactccgggaggcccgt

SEQ ID NO: 1966 - DNA, 19 bp, Artificial Sequence
  Synthetic
ctggactccgggaggcccg

SEQ ID NO: 1967 - DNA, 19 bp, Artificial Sequence
  Synthetic
cctggactccgggaggccc

SEQ ID NO: 1968 - DNA, 19 bp, Artificial Sequence
  Synthetic
tcctggactccgggaggcc

SEQ ID NO: 1969 - DNA, 19 bp, Artificial Sequence
  Synthetic
atcctggactccgggaggc

SEQ ID NO: 1970 - DNA, 19 bp, Artificial Sequence
  Synthetic
aatcctggactccgggagg

SEQ ID NO: 1971 - DNA, 19 bp, Artificial Sequence
  Synthetic
gaatcctggactccgggag

SEQ ID NO: 1972 - DNA, 19 bp, Artificial Sequence
  Synthetic
tgaatcctggactccggga

SEQ ID NO: 1973 - DNA, 19 bp, Artificial Sequence
  Synthetic
ctgaatcctggactccggg

SEQ ID NO: 1974 - DNA, 19 bp, Artificial Sequence
  Synthetic
tctgaatcctggactccgg

SEQ ID NO: 1975 - DNA, 19 bp, Artificial Sequence
  Synthetic
atctgaatcctggactccg

SEQ ID NO: 1976 - DNA, 19 bp, Artificial Sequence
  Synthetic
gatctgaatcctggactcc

SEQ ID NO: 1977 - DNA, 19 bp, Artificial Sequence
  Synthetic
agatctgaatcctggactc

SEQ ID NO: 1978 - DNA, 19 bp, Artificial Sequence
  Synthetic
cagatctgaatcctggact

SEQ ID NO: 1979 - DNA, 19 bp, Artificial Sequence
  Synthetic
ccagatctgaatcctggac

SEQ ID NO: 1980 - DNA, 19 bp, Artificial Sequence
  Synthetic
accagatctgaatcctgga

SEQ ID NO: 1981 - DNA, 19 bp, Artificial Sequence
  Synthetic
aaccagatctgaatcctgg

SEQ ID NO: 1982 - DNA, 19 bp, Artificial Sequence
  Synthetic
aaaccagatctgaatcctg

SEQ ID NO: 1983 - DNA, 19 bp, Artificial Sequence
  Synthetic
gaaaccagatctgaatcct

SEQ ID NO: 1984 - DNA, 19 bp, Artificial Sequence
  Synthetic
tgaaaccagatctgaatcc

SEQ ID NO: 1985 - DNA, 19 bp, Artificial Sequence
  Synthetic
ctgaaaccagatctgaatc

SEQ ID NO: 1986 - DNA, 19 bp, Artificial Sequence
  Synthetic
tctgaaaccagatctgaat

SEQ ID NO: 1987 - DNA, 19 bp, Artificial Sequence
  Synthetic
ttctgaaaccagatctgaa

SEQ ID NO: 1988 - DNA, 19 bp, Artificial Sequence
  Synthetic
attctgaaaccagatctga

SEQ ID NO: 1989 - DNA, 19 bp, Artificial Sequence
  Synthetic
gattctgaaaccagatctg

SEQ ID NO: 1990 - DNA, 19 bp, Artificial Sequence
  Synthetic
cgattctgaaaccagatct

SEQ ID NO: 1991 - DNA, 19 bp, Artificial Sequence
  Synthetic
tcgattctgaaaccagatc

SEQ ID NO: 1992 - DNA, 19 bp, Artificial Sequence
  Synthetic
ttcgattctgaaaccagat

SEQ ID NO: 1993 - DNA, 19 bp, Artificial Sequence
  Synthetic
cttcgattctgaaaccaga

SEQ ID NO: 1994 - DNA, 19 bp, Artificial Sequence
  Synthetic
ccttcgattctgaaaccag

SEQ ID NO: 1995 - DNA, 19 bp, Artificial Sequence
  Synthetic
cccttcgattctgaaacca

SEQ ID NO: 1996 - DNA, 19 bp, Artificial Sequence
  Synthetic
gcccttcgattctgaaacc

SEQ ID NO: 1997 - DNA, 19 bp, Artificial Sequence
  Synthetic
ggcccttcgattctgaaac

SEQ ID NO: 1998 - DNA, 19 bp, Artificial Sequence
  Synthetic
tggcccttcgattctgaaa

SEQ ID NO: 1999 - DNA, 19 bp, Artificial Sequence
  Synthetic
ctggcccttcgattctgaa

SEQ ID NO: 2000 - DNA, 19 bp, Artificial Sequence
  Synthetic
cctggcccttcgattctga

SEQ ID NO: 2001 - DNA, 19 bp, Artificial Sequence
  Synthetic
gcctggcccttcgattctg

SEQ ID NO: 2002 - DNA, 19 bp, Artificial Sequence
  Synthetic
tgcctggcccttcgattct

SEQ ID NO: 2003 - DNA, 19 bp, Artificial Sequence
  Synthetic
gtgcctggcccttcgattc

SEQ ID NO: 2004 - DNA, 19 bp, Artificial Sequence
  Synthetic
ggtgcctggcccttcgatt

SEQ ID NO: 2005 - DNA, 19 bp, Artificial Sequence
  Synthetic
gggtgcctggcccttcgat

SEQ ID NO: 2006 - DNA, 19 bp, Artificial Sequence
  Synthetic
cgggtgcctggcccttcga

SEQ ID NO: 2007 - DNA, 19 bp, Artificial Sequence
  Synthetic
ccgggtgcctggcccttcg

SEQ ID NO: 2008 - DNA, 19 bp, Artificial Sequence
  Synthetic
cccgggtgcctggcccttc

SEQ ID NO: 2009 - DNA, 19 bp, Artificial Sequence
  Synthetic
tcccgggtgcctggccctt

SEQ ID NO: 2010 - DNA, 19 bp, Artificial Sequence
  Synthetic
gtcccgggtgcctggccct

SEQ ID NO: 2011 - DNA, 19 bp, Artificial Sequence
  Synthetic
tgtcccgggtgcctggccc

SEQ ID NO: 2012 - DNA, 19 bp, Artificial Sequence
  Synthetic
ctgtcccgggtgcctggcc

SEQ ID NO: 2013 - DNA, 19 bp, Artificial Sequence
  Synthetic
cctgtcccgggtgcctggc

SEQ ID NO: 2014 - DNA, 19 bp, Artificial Sequence
  Synthetic
ccctgtcccgggtgcctgg

SEQ ID NO: 2015 - DNA, 19 bp, Artificial Sequence
  Synthetic
accctgtcccgggtgcctg

SEQ ID NO: 2016 - DNA, 19 bp, Artificial Sequence
  Synthetic
caccctgtcccgggtgcct

SEQ ID NO: 2017 - DNA, 19 bp, Artificial Sequence
  Synthetic
ccaccctgtcccgggtgcc

SEQ ID NO: 2018 - DNA, 19 bp, Artificial Sequence
  Synthetic
gccaccctgtcccgggtgc

SEQ ID NO: 2019 - DNA, 19 bp, Artificial Sequence
  Synthetic
tgccaccctgtcccgggtg

SEQ ID NO: 2020 - DNA, 19 bp, Artificial Sequence
  Synthetic
ctgccaccctgtcccgggt

SEQ ID NO: 2021 - DNA, 19 bp, Artificial Sequence
  Synthetic
cctgccaccctgtcccggg

SEQ ID NO: 2022 - DNA, 19 bp, Artificial Sequence
  Synthetic
ccctgccaccctgtcccgg

SEQ ID NO: 2023 - DNA, 19 bp, Artificial Sequence
  Synthetic
gccctgccaccctgtcccg

SEQ ID NO: 2024 - DNA, 19 bp, Artificial Sequence
  Synthetic
cgccctgccaccctgtccc

SEQ ID NO: 2025 - DNA, 19 bp, Artificial Sequence
  Synthetic
gcgccctgccaccctgtcc

SEQ ID NO: 2026 - DNA, 19 bp, Artificial Sequence
  Synthetic
ggcgccctgccaccctgtc

SEQ ID NO: 2027 - DNA, 19 bp, Artificial Sequence
  Synthetic
gggcgccctgccaccctgt

SEQ ID NO: 2028 - DNA, 19 bp, Artificial Sequence
  Synthetic
cgggcgccctgccaccctg

SEQ ID NO: 2029 - DNA, 19 bp, Artificial Sequence
  Synthetic
gcgggcgccctgccaccct

SEQ ID NO: 2030 - DNA, 19 bp, Artificial Sequence
  Synthetic
cgcgggcgccctgccaccc

SEQ ID NO: 2031 - DNA, 19 bp, Artificial Sequence
  Synthetic
gcgcgggcgccctgccacc

SEQ ID NO: 2032 - DNA, 19 bp, Artificial Sequence
  Synthetic
tgcgcgggcgccctgccac

SEQ ID NO: 2033 - DNA, 19 bp, Artificial Sequence
  Synthetic
ctgcgcgggcgccctgcca

SEQ ID NO: 2034 - DNA, 19 bp, Artificial Sequence
  Synthetic
cctgcgcgggcgccctgcc

SEQ ID NO: 2035 - DNA, 19 bp, Artificial Sequence
  Synthetic
gcctgcgcgggcgccctgc

SEQ ID NO: 2036 - DNA, 19 bp, Artificial Sequence
  Synthetic
tgcctgcgcgggcgccctg

SEQ ID NO: 2037 - DNA, 19 bp, Artificial Sequence
  Synthetic
ctgcctgcgcgggcgccct

SEQ ID NO: 2038 - DNA, 19 bp, Artificial Sequence
  Synthetic
cctgcctgcgcgggcgccc

SEQ ID NO: 2039 - DNA, 19 bp, Artificial Sequence
  Synthetic
gcctgcctgcgcgggcgcc

SEQ ID NO: 2040 - DNA, 19 bp, Artificial Sequence
  Synthetic
cgcctgcctgcgcgggcgc

SEQ ID NO: 2041 - DNA, 19 bp, Artificial Sequence
  Synthetic
ccgcctgcctgcgcgggcg

SEQ ID NO: 2042 - DNA, 19 bp, Artificial Sequence
  Synthetic
gccgcctgcctgcgcgggc

SEQ ID NO: 2043 - DNA, 19 bp, Artificial Sequence
  Synthetic
ggccgcctgcctgcgcggg

SEQ ID NO: 2044 - DNA, 19 bp, Artificial Sequence
  Synthetic
aggccgcctgcctgcgcgg

SEQ ID NO: 2045 - DNA, 19 bp, Artificial Sequence
  Synthetic
caggccgcctgcctgcgcg

SEQ ID NO: 2046 - DNA, 19 bp, Artificial Sequence
  Synthetic
acaggccgcctgcctgcgc

SEQ ID NO: 2047 - DNA, 19 bp, Artificial Sequence
  Synthetic
cacaggccgcctgcctgcg

SEQ ID NO: 2048 - DNA, 19 bp, Artificial Sequence
  Synthetic
gcacaggccgcctgcctgc

SEQ ID NO: 2049 - DNA, 19 bp, Artificial Sequence
  Synthetic
tgcacaggccgcctgcctg

SEQ ID NO: 2050 - DNA, 19 bp, Artificial Sequence
  Synthetic
ctgcacaggccgcctgcct

SEQ ID NO: 2051 - DNA, 19 bp, Artificial Sequence
  Synthetic
gctgcacaggccgcctgcc

SEQ ID NO: 2052 - DNA, 19 bp, Artificial Sequence
  Synthetic
cgctgcacaggccgcctgc

SEQ ID NO: 2053 - DNA, 19 bp, Artificial Sequence
  Synthetic
gcgctgcacaggccgcctg

SEQ ID NO: 2054 - DNA, 19 bp, Artificial Sequence
  Synthetic
cgcgctgcacaggccgcct

SEQ ID NO: 2055 - DNA, 19 bp, Artificial Sequence
  Synthetic
ccgcgctgcacaggccgcc

SEQ ID NO: 2056 - DNA, 19 bp, Artificial Sequence
  Synthetic
gccgcgctgcacaggccgc

SEQ ID NO: 2057 - DNA, 19 bp, Artificial Sequence
  Synthetic
ggccgcgctgcacaggccg

SEQ ID NO: 2058 - DNA, 19 bp, Artificial Sequence
  Synthetic
gggccgcgctgcacaggcc

SEQ ID NO: 2059 - DNA, 19 bp, Artificial Sequence
  Synthetic
ggggccgcgctgcacaggc

SEQ ID NO: 2060 - DNA, 19 bp, Artificial Sequence
  Synthetic
gggggccgcgctgcacagg

SEQ ID NO: 2061 - DNA, 19 bp, Artificial Sequence
  Synthetic
cgggggccgcgctgcacag

SEQ ID NO: 2062 - DNA, 19 bp, Artificial Sequence
  Synthetic
ccgggggccgcgctgcaca

SEQ ID NO: 2063 - DNA, 19 bp, Artificial Sequence
  Synthetic
gccgggggccgcgctgcac

SEQ ID NO: 2064 - DNA, 19 bp, Artificial Sequence
  Synthetic
cgccgggggccgcgctgca

SEQ ID NO: 2065 - DNA, 19 bp, Artificial Sequence
  Synthetic
ccgccgggggccgcgctgc

SEQ ID NO: 2066 - DNA, 19 bp, Artificial Sequence
  Synthetic
cccgccgggggccgcgctg

SEQ ID NO: 2067 - DNA, 19 bp, Artificial Sequence
  Synthetic
ccccgccgggggccgcgct

SEQ ID NO: 2068 - DNA, 19 bp, Artificial Sequence
  Synthetic
cccccgccgggggccgcgc

SEQ ID NO: 2069 - DNA, 19 bp, Artificial Sequence
  Synthetic
acccccgccgggggccgcg

SEQ ID NO: 2070 - DNA, 19 bp, Artificial Sequence
  Synthetic
gacccccgccgggggccgc

SEQ ID NO: 2071 - DNA, 19 bp, Artificial Sequence
  Synthetic
tgacccccgccgggggccg

SEQ ID NO: 2072 - DNA, 19 bp, Artificial Sequence
  Synthetic
gtgacccccgccgggggcc

SEQ ID NO: 2073 - DNA, 19 bp, Artificial Sequence
  Synthetic
ggtgacccccgccgggggc

SEQ ID NO: 2074 - DNA, 19 bp, Artificial Sequence
  Synthetic
gggtgacccccgccggggg

SEQ ID NO: 2075 - DNA, 19 bp, Artificial Sequence
  Synthetic
agggtgacccccgccgggg

SEQ ID NO: 2076 - DNA, 19 bp, Artificial Sequence
  Synthetic
cagggtgacccccgccggg

SEQ ID NO: 2077 - DNA, 19 bp, Artificial Sequence
  Synthetic
gcagggtgacccccgccgg

SEQ ID NO: 2078 - DNA, 19 bp, Artificial Sequence
  Synthetic
agcagggtgacccccgccg

SEQ ID NO: 2079 - DNA, 19 bp, Artificial Sequence
  Synthetic
gagcagggtgacccccgcc

SEQ ID NO: 2080 - DNA, 19 bp, Artificial Sequence
  Synthetic
ggagcagggtgacccccgc

SEQ ID NO: 2081 - DNA, 19 bp, Artificial Sequence
  Synthetic
gggagcagggtgacccccg

SEQ ID NO: 2082 - DNA, 19 bp, Artificial Sequence
  Synthetic
agggagcagggtgaccccc

SEQ ID NO: 2083 - DNA, 19 bp, Artificial Sequence
  Synthetic
gagggagcagggtgacccc

SEQ ID NO: 2084 - DNA, 19 bp, Artificial Sequence
  Synthetic
cgagggagcagggtgaccc

SEQ ID NO: 2085 - DNA, 19 bp, Artificial Sequence
  Synthetic
acgagggagcagggtgacc

SEQ ID NO: 2086 - DNA, 19 bp, Artificial Sequence
  Synthetic
cacgagggagcagggtgac

SEQ ID NO: 2087 - DNA, 19 bp, Artificial Sequence
  Synthetic
ccacgagggagcagggtga

SEQ ID NO: 2088 - DNA, 19 bp, Artificial Sequence
  Synthetic
cccacgagggagcagggtg

SEQ ID NO: 2089 - DNA, 19 bp, Artificial Sequence
  Synthetic
acccacgagggagcagggt

SEQ ID NO: 2090 - DNA, 19 bp, Artificial Sequence
  Synthetic
gacccacgagggagcaggg

SEQ ID NO: 2091 - DNA, 19 bp, Artificial Sequence
  Synthetic
cgacccacgagggagcagg

SEQ ID NO: 2092 - DNA, 19 bp, Artificial Sequence
  Synthetic
gcgacccacgagggagcag

SEQ ID NO: 2093 - DNA, 19 bp, Artificial Sequence
  Synthetic
ggcgacccacgagggagca

SEQ ID NO: 2094 - DNA, 19 bp, Artificial Sequence
  Synthetic
aggcgacccacgagggagc

SEQ ID NO: 2095 - DNA, 19 bp, Artificial Sequence
  Synthetic
aaggcgacccacgagggag

SEQ ID NO: 2096 - DNA, 19 bp, Artificial Sequence
  Synthetic
gaaggcgacccacgaggga

SEQ ID NO: 2097 - DNA, 19 bp, Artificial Sequence
  Synthetic
cgaaggcgacccacgaggg

SEQ ID NO: 2098 - DNA, 19 bp, Artificial Sequence
  Synthetic
gcgaaggcgacccacgagg

SEQ ID NO: 2099 - DNA, 19 bp, Artificial Sequence
  Synthetic
ggcgaaggcgacccacgag

SEQ ID NO: 2100 - DNA, 19 bp, Artificial Sequence
  Synthetic
gggcgaaggcgacccacga

SEQ ID NO: 2101 - DNA, 19 bp, Artificial Sequence
  Synthetic
tgggcgaaggcgacccacg

SEQ ID NO: 2102 - DNA, 19 bp, Artificial Sequence
  Synthetic
gtgggcgaaggcgacccac

SEQ ID NO: 2103 - DNA, 19 bp, Artificial Sequence
  Synthetic
tgtgggcgaaggcgaccca

SEQ ID NO: 2104 - DNA, 19 bp, Artificial Sequence
  Synthetic
gtgtgggcgaaggcgaccc

SEQ ID NO: 2105 - DNA, 19 bp, Artificial Sequence
  Synthetic
ggtgtgggcgaaggcgacc

SEQ ID NO: 2106 - DNA, 19 bp, Artificial Sequence
  Synthetic
cggtgtgggcgaaggcgac

SEQ ID NO: 2107 - DNA, 19 bp, Artificial Sequence
  Synthetic
ccggtgtgggcgaaggcga

SEQ ID NO: 2108 - DNA, 19 bp, Artificial Sequence
  Synthetic
gccggtgtgggcgaaggcg

SEQ ID NO: 2109 - DNA, 19 bp, Artificial Sequence
  Synthetic
cgccggtgtgggcgaaggc

SEQ ID NO: 2110 - DNA, 19 bp, Artificial Sequence
  Synthetic
gcgccggtgtgggcgaagg

SEQ ID NO: 2111 - DNA, 19 bp, Artificial Sequence
  Synthetic
cgcgccggtgtgggcgaag

SEQ ID NO: 2112 - DNA, 19 bp, Artificial Sequence
  Synthetic
acgcgccggtgtgggcgaa

SEQ ID NO: 2113 - DNA, 19 bp, Artificial Sequence
  Synthetic
cacgcgccggtgtgggcga

SEQ ID NO: 2114 - DNA, 19 bp, Artificial Sequence
  Synthetic
ccacgcgccggtgtgggcg

SEQ ID NO: 2115 - DNA, 19 bp, Artificial Sequence
  Synthetic
cccacgcgccggtgtgggc

SEQ ID NO: 2116 - DNA, 19 bp, Artificial Sequence
  Synthetic
ccccacgcgccggtgtggg

SEQ ID NO: 2117 - DNA, 19 bp, Artificial Sequence
  Synthetic
tccccacgcgccggtgtgg

SEQ ID NO: 2118 - DNA, 19 bp, Artificial Sequence
  Synthetic
ttccccacgcgccggtgtg

SEQ ID NO: 2119 - DNA, 19 bp, Artificial Sequence
  Synthetic
gttccccacgcgccggtgt

SEQ ID NO: 2120 - DNA, 19 bp, Artificial Sequence
  Synthetic
cgttccccacgcgccggtg

SEQ ID NO: 2121 - DNA, 19 bp, Artificial Sequence
  Synthetic
ccgttccccacgcgccggt

SEQ ID NO: 2122 - DNA, 19 bp, Artificial Sequence
  Synthetic
cccgttccccacgcgccgg

SEQ ID NO: 2123 - DNA, 19 bp, Artificial Sequence
  Synthetic
ccccgttccccacgcgccg

SEQ ID NO: 2124 - DNA, 19 bp, Artificial Sequence
  Synthetic
gccccgttccccacgcgcc

SEQ ID NO: 2125 - DNA, 19 bp, Artificial Sequence
  Synthetic
agccccgttccccacgcgc

SEQ ID NO: 2126 - DNA, 19 bp, Artificial Sequence
  Synthetic
aagccccgttccccacgcg

SEQ ID NO: 2127 - DNA, 19 bp, Artificial Sequence
  Synthetic
gaagccccgttccccacgc

SEQ ID NO: 2128 - DNA, 19 bp, Artificial Sequence
  Synthetic
ggaagccccgttccccacg

SEQ ID NO: 2129 - DNA, 19 bp, Artificial Sequence
  Synthetic
gggaagccccgttccccac

SEQ ID NO: 2130 - DNA, 19 bp, Artificial Sequence
  Synthetic
cgggaagccccgttcccca

SEQ ID NO: 2131 - DNA, 19 bp, Artificial Sequence
  Synthetic
gcgggaagccccgttcccc

SEQ ID NO: 2132 - DNA, 19 bp, Artificial Sequence
  Synthetic
tgcgggaagccccgttccc

SEQ ID NO: 2133 - DNA, 19 bp, Artificial Sequence
  Synthetic
gtgcgggaagccccgttcc

SEQ ID NO: 2134 - DNA, 19 bp, Artificial Sequence
  Synthetic
ggtgcgggaagccccgttc

SEQ ID NO: 2135 - DNA, 19 bp, Artificial Sequence
  Synthetic
gggtgcgggaagccccgtt

SEQ ID NO: 2136 - DNA, 19 bp, Artificial Sequence
  Synthetic
ggggtgcgggaagccccgt

SEQ ID NO: 2137 - DNA, 19 bp, Artificial Sequence
  Synthetic
tggggtgcgggaagccccg

SEQ ID NO: 2138 - DNA, 19 bp, Artificial Sequence
  Synthetic
gtggggtgcgggaagcccc

SEQ ID NO: 2139 - DNA, 19 bp, Artificial Sequence
  Synthetic
cgtggggtgcgggaagccc

SEQ ID NO: 2140 - DNA, 19 bp, Artificial Sequence
  Synthetic
acgtggggtgcgggaagcc

SEQ ID NO: 2141 - DNA, 19 bp, Artificial Sequence
  Synthetic
cacgtggggtgcgggaagc

SEQ ID NO: 2142 - DNA, 19 bp, Artificial Sequence
  Synthetic
gcacgtggggtgcgggaag

SEQ ID NO: 2143 - DNA, 19 bp, Artificial Sequence
  Synthetic
ggcacgtggggtgcgggaa

SEQ ID NO: 2144 - DNA, 19 bp, Artificial Sequence
  Synthetic
gggcacgtggggtgcggga

SEQ ID NO: 2145 - DNA, 19 bp, Artificial Sequence
  Synthetic
agggcacgtggggtgcggg

SEQ ID NO: 2146 - DNA, 19 bp, Artificial Sequence
  Synthetic
cagggcacgtggggtgcgg

SEQ ID NO: 2147 - DNA, 19 bp, Artificial Sequence
  Synthetic
gcagggcacgtggggtgcg

SEQ ID NO: 2148 - DNA, 19 bp, Artificial Sequence
  Synthetic
cgcagggcacgtggggtgc

SEQ ID NO: 2149 - DNA, 19 bp, Artificial Sequence
  Synthetic
gcgcagggcacgtggggtg

SEQ ID NO: 2150 - DNA, 19 bp, Artificial Sequence
  Synthetic
cgcgcagggcacgtggggt

SEQ ID NO: 2151 - DNA, 19 bp, Artificial Sequence
  Synthetic
gcgcgcagggcacgtgggg

SEQ ID NO: 2152 - DNA, 19 bp, Artificial Sequence
  Synthetic
ggcgcgcagggcacgtggg

SEQ ID NO: 2153 - DNA, 19 bp, Artificial Sequence
  Synthetic
aggcgcgcagggcacgtgg

SEQ ID NO: 2154 - DNA, 19 bp, Artificial Sequence
  Synthetic
caggcgcgcagggcacgtg

SEQ ID NO: 2155 - DNA, 19 bp, Artificial Sequence
  Synthetic
ccaggcgcgcagggcacgt

SEQ ID NO: 2156 - DNA, 19 bp, Artificial Sequence
  Synthetic
cccaggcgcgcagggcacg

SEQ ID NO: 2157 - DNA, 19 bp, Artificial Sequence
  Synthetic
ccccaggcgcgcagggcac

SEQ ID NO: 2158 - DNA, 19 bp, Artificial Sequence
  Synthetic
gccccaggcgcgcagggca

SEQ ID NO: 2159 - DNA, 19 bp, Artificial Sequence
  Synthetic
agccccaggcgcgcagggc

SEQ ID NO: 2160 - DNA, 19 bp, Artificial Sequence
  Synthetic
gagccccaggcgcgcaggg

SEQ ID NO: 2161 - DNA, 19 bp, Artificial Sequence
  Synthetic
agagccccaggcgcgcagg

SEQ ID NO: 2162 - DNA, 19 bp, Artificial Sequence
  Synthetic
gagagccccaggcgcgcag

SEQ ID NO: 2163 - DNA, 19 bp, Artificial Sequence
  Synthetic
ggagagccccaggcgcgca

SEQ ID NO: 2164 - DNA, 19 bp, Artificial Sequence
  Synthetic
gggagagccccaggcgcgc

SEQ ID NO: 2165 - DNA, 19 bp, Artificial Sequence
  Synthetic
tgggagagccccaggcgcg

SEQ ID NO: 2166 - DNA, 19 bp, Artificial Sequence
  Synthetic
gtgggagagccccaggcgc

SEQ ID NO: 2167 - DNA, 19 bp, Artificial Sequence
  Synthetic
tgtgggagagccccaggcg

SEQ ID NO: 2168 - DNA, 19 bp, Artificial Sequence
  Synthetic
ctgtgggagagccccaggc

SEQ ID NO: 2169 - DNA, 19 bp, Artificial Sequence
  Synthetic
cctgtgggagagccccagg

SEQ ID NO: 2170 - DNA, 19 bp, Artificial Sequence
  Synthetic
ccctgtgggagagccccag

SEQ ID NO: 2171 - DNA, 19 bp, Artificial Sequence
  Synthetic
cccctgtgggagagcccca

SEQ ID NO: 2172 - DNA, 19 bp, Artificial Sequence
  Synthetic
ccccctgtgggagagcccc

SEQ ID NO: 2173 - DNA, 19 bp, Artificial Sequence
  Synthetic
gccccctgtgggagagccc

SEQ ID NO: 2174 - DNA, 19 bp, Artificial Sequence
  Synthetic
agccccctgtgggagagcc

SEQ ID NO: 2175 - DNA, 19 bp, Artificial Sequence
  Synthetic
aagccccctgtgggagagc

SEQ ID NO: 2176 - DNA, 19 bp, Artificial Sequence
  Synthetic
aaagccccctgtgggagag

SEQ ID NO: 2177 - DNA, 19 bp, Artificial Sequence
  Synthetic
gaaagccccctgtgggaga

SEQ ID NO: 2178 - DNA, 19 bp, Artificial Sequence
  Synthetic
cgaaagccccctgtgggag

SEQ ID NO: 2179 - DNA, 19 bp, Artificial Sequence
  Synthetic
acgaaagccccctgtggga

SEQ ID NO: 2180 - DNA, 19 bp, Artificial Sequence
  Synthetic
cacgaaagccccctgtggg

SEQ ID NO: 2181 - DNA, 19 bp, Artificial Sequence
  Synthetic
tcacgaaagccccctgtgg

SEQ ID NO: 2182 - DNA, 19 bp, Artificial Sequence
  Synthetic
ctcacgaaagccccctgtg

SEQ ID NO: 2183 - DNA, 19 bp, Artificial Sequence
  Synthetic
gctcacgaaagccccctgt

SEQ ID NO: 2184 - DNA, 19 bp, Artificial Sequence
  Synthetic
ggctcacgaaagccccctg

SEQ ID NO: 2185 - DNA, 19 bp, Artificial Sequence
  Synthetic
tggctcacgaaagccccct

SEQ ID NO: 2186 - DNA, 19 bp, Artificial Sequence
  Synthetic
ctggctcacgaaagccccc

SEQ ID NO: 2187 - DNA, 19 bp, Artificial Sequence
  Synthetic
cctggctcacgaaagcccc

SEQ ID NO: 2188 - DNA, 19 bp, Artificial Sequence
  Synthetic
gcctggctcacgaaagccc

SEQ ID NO: 2189 - DNA, 19 bp, Artificial Sequence
  Synthetic
tgcctggctcacgaaagcc

SEQ ID NO: 2190 - DNA, 19 bp, Artificial Sequence
  Synthetic
ctgcctggctcacgaaagc

SEQ ID NO: 2191 - DNA, 19 bp, Artificial Sequence
  Synthetic
gctgcctggctcacgaaag

SEQ ID NO: 2192 - DNA, 19 bp, Artificial Sequence
  Synthetic
cgctgcctggctcacgaaa

SEQ ID NO: 2193 - DNA, 19 bp, Artificial Sequence
  Synthetic
tcgctgcctggctcacgaa

SEQ ID NO: 2194 - DNA, 19 bp, Artificial Sequence
  Synthetic
ctcgctgcctggctcacga

SEQ ID NO: 2195 - DNA, 19 bp, Artificial Sequence
  Synthetic
cctcgctgcctggctcacg

SEQ ID NO: 2196 - DNA, 19 bp, Artificial Sequence
  Synthetic
ccctcgctgcctggctcac

SEQ ID NO: 2197 - DNA, 19 bp, Artificial Sequence
  Synthetic
gccctcgctgcctggctca

SEQ ID NO: 2198 - DNA, 19 bp, Artificial Sequence
  Synthetic
ggccctcgctgcctggctc

SEQ ID NO: 2199 - DNA, 19 bp, Artificial Sequence
  Synthetic
cggccctcgctgcctggct

SEQ ID NO: 2200 - DNA, 19 bp, Artificial Sequence
  Synthetic
gcggccctcgctgcctggc

SEQ ID NO: 2201 - DNA, 19 bp, Artificial Sequence
  Synthetic
ggcggccctcgctgcctgg

SEQ ID NO: 2202 - DNA, 19 bp, Artificial Sequence
  Synthetic
gggcggccctcgctgcctg

SEQ ID NO: 2203 - DNA, 19 bp, Artificial Sequence
  Synthetic
ggggcggccctcgctgcct

SEQ ID NO: 2204 - DNA, 19 bp, Artificial Sequence
  Synthetic
gggggcggccctcgctgcc

SEQ ID NO: 2205 - DNA, 19 bp, Artificial Sequence
  Synthetic
cgggggcggccctcgctgc

SEQ ID NO: 2206 - DNA, 19 bp, Artificial Sequence
  Synthetic
gcgggggcggccctcgctg

SEQ ID NO: 2207 - DNA, 19 bp, Artificial Sequence
  Synthetic
cgcgggggcggccctcgct

SEQ ID NO: 2208 - DNA, 19 bp, Artificial Sequence
  Synthetic
gcgcgggggcggccctcgc

SEQ ID NO: 2209 - DNA, 19 bp, Artificial Sequence
  Synthetic
agcgcgggggcggccctcg

SEQ ID NO: 2210 - DNA, 19 bp, Artificial Sequence
  Synthetic
cagcgcgggggcggccctc

SEQ ID NO: 2211 - DNA, 19 bp, Artificial Sequence
  Synthetic
gcagcgcgggggcggccct

SEQ ID NO: 2212 - DNA, 19 bp, Artificial Sequence
  Synthetic
tgcagcgcgggggcggccc

SEQ ID NO: 2213 - DNA, 19 bp, Artificial Sequence
  Synthetic
ctgcagcgcgggggcggcc

SEQ ID NO: 2214 - DNA, 19 bp, Artificial Sequence
  Synthetic
gctgcagcgcgggggcggc

SEQ ID NO: 2215 - DNA, 19 bp, Artificial Sequence
  Synthetic
ggctgcagcgcgggggcgg

SEQ ID NO: 2216 - DNA, 19 bp, Artificial Sequence
  Synthetic
gggctgcagcgcgggggcg

SEQ ID NO: 2217 - DNA, 19 bp, Artificial Sequence
  Synthetic
tgggctgcagcgcgggggc

SEQ ID NO: 2218 - DNA, 19 bp, Artificial Sequence
  Synthetic
ctgggctgcagcgcggggg

SEQ ID NO: 2219 - DNA, 19 bp, Artificial Sequence
  Synthetic
gctgggctgcagcgcgggg

SEQ ID NO: 2220 - DNA, 19 bp, Artificial Sequence
  Synthetic
ggctgggctgcagcgcggg

SEQ ID NO: 2221 - DNA, 19 bp, Artificial Sequence
  Synthetic
tggctgggctgcagcgcgg

SEQ ID NO: 2222 - DNA, 19 bp, Artificial Sequence
  Synthetic
ctggctgggctgcagcgcg

SEQ ID NO: 2223 - DNA, 19 bp, Artificial Sequence
  Synthetic
cctggctgggctgcagcgc

SEQ ID NO: 2224 - DNA, 19 bp, Artificial Sequence
  Synthetic
gcctggctgggctgcagcg

SEQ ID NO: 2225 - DNA, 19 bp, Artificial Sequence
  Synthetic
ggcctggctgggctgcagc

SEQ ID NO: 2226 - DNA, 19 bp, Artificial Sequence
  Synthetic
cggcctggctgggctgcag

SEQ ID NO: 2227 - DNA, 19 bp, Artificial Sequence
  Synthetic
gcggcctggctgggctgca

SEQ ID NO: 2228 - DNA, 19 bp, Artificial Sequence
  Synthetic
cgcggcctggctgggctgc

SEQ ID NO: 2229 - DNA, 19 bp, Artificial Sequence
  Synthetic
gcgcggcctggctgggctg

SEQ ID NO: 2230 - DNA, 19 bp, Artificial Sequence
  Synthetic
ggcgcggcctggctgggct

SEQ ID NO: 2231 - DNA, 19 bp, Artificial Sequence
  Synthetic
cggcgcggcctggctgggc

SEQ ID NO: 2232 - DNA, 19 bp, Artificial Sequence
  Synthetic
ccggcgcggcctggctggg

SEQ ID NO: 2233 - DNA, 19 bp, Artificial Sequence
  Synthetic
gccggcgcggcctggctgg

SEQ ID NO: 2234 - DNA, 19 bp, Artificial Sequence
  Synthetic
tgccggcgcggcctggctg

SEQ ID NO: 2235 - DNA, 19 bp, Artificial Sequence
  Synthetic
ctgccggcgcggcctggct

SEQ ID NO: 2236 - DNA, 19 bp, Artificial Sequence
  Synthetic
tctgccggcgcggcctggc

SEQ ID NO: 2237 - DNA, 19 bp, Artificial Sequence
  Synthetic
ctctgccggcgcggcctgg

SEQ ID NO: 2238 - DNA, 19 bp, Artificial Sequence
  Synthetic
cctctgccggcgcggcctg

SEQ ID NO: 2239 - DNA, 19 bp, Artificial Sequence
  Synthetic
ccctctgccggcgcggcct

SEQ ID NO: 2240 - DNA, 19 bp, Artificial Sequence
  Synthetic
cccctctgccggcgcggcc

SEQ ID NO: 2241 - DNA, 19 bp, Artificial Sequence
  Synthetic
tcccctctgccggcgcggc

SEQ ID NO: 2242 - DNA, 19 bp, Artificial Sequence
  Synthetic
atcccctctgccggcgcgg

SEQ ID NO: 2243 - DNA, 19 bp, Artificial Sequence
  Synthetic
gatcccctctgccggcgcg

SEQ ID NO: 2244 - DNA, 19 bp, Artificial Sequence
  Synthetic
agatcccctctgccggcgc

SEQ ID NO: 2245 - DNA, 19 bp, Artificial Sequence
  Synthetic
gagatcccctctgccggcg

SEQ ID NO: 2246 - DNA, 19 bp, Artificial Sequence
  Synthetic
ggagatcccctctgccggc

SEQ ID NO: 2247 - DNA, 19 bp, Artificial Sequence
  Synthetic
gggagatcccctctgccgg

SEQ ID NO: 2248 - DNA, 19 bp, Artificial Sequence
  Synthetic
tgggagatcccctctgccg

SEQ ID NO: 2249 - DNA, 19 bp, Artificial Sequence
  Synthetic
ttgggagatcccctctgcc

SEQ ID NO: 2250 - DNA, 19 bp, Artificial Sequence
  Synthetic
gttgggagatcccctctgc

SEQ ID NO: 2251 - DNA, 19 bp, Artificial Sequence
  Synthetic
ggttgggagatcccctctg

SEQ ID NO: 2252 - DNA, 19 bp, Artificial Sequence
  Synthetic
aggttgggagatcccctct

SEQ ID NO: 2253 - DNA, 19 bp, Artificial Sequence
  Synthetic
caggttgggagatcccctc

SEQ ID NO: 2254 - DNA, 19 bp, Artificial Sequence
  Synthetic
gcaggttgggagatcccct

SEQ ID NO: 2255 - DNA, 19 bp, Artificial Sequence
  Synthetic
ggcaggttgggagatcccc

SEQ ID NO: 2256 - DNA, 19 bp, Artificial Sequence
  Synthetic
gggcaggttgggagatccc

SEQ ID NO: 2257 - DNA, 19 bp, Artificial Sequence
  Synthetic
ggggcaggttgggagatcc

SEQ ID NO: 2258 - DNA, 19 bp, Artificial Sequence
  Synthetic
cggggcaggttgggagatc

SEQ ID NO: 2259 - DNA, 19 bp, Artificial Sequence
  Synthetic
ccggggcaggttgggagat

SEQ ID NO: 2260 - DNA, 19 bp, Artificial Sequence
  Synthetic
gccggggcaggttgggaga

SEQ ID NO: 2261 - DNA, 19 bp, Artificial Sequence
  Synthetic
cgccggggcaggttgggag

SEQ ID NO: 2262 - DNA, 19 bp, Artificial Sequence
  Synthetic
gcgccggggcaggttggga

SEQ ID NO: 2263 - DNA, 19 bp, Artificial Sequence
  Synthetic
cgcgccggggcaggttggg

SEQ ID NO: 2264 - DNA, 19 bp, Artificial Sequence
  Synthetic
gcgcgccggggcaggttgg

SEQ ID NO: 2265 - DNA, 19 bp, Artificial Sequence
  Synthetic
cgcgcgccggggcaggttg

SEQ ID NO: 2266 - DNA, 19 bp, Artificial Sequence
  Synthetic
ccgcgcgccggggcaggtt

SEQ ID NO: 2267 - DNA, 19 bp, Artificial Sequence
  Synthetic
cccgcgcgccggggcaggt

SEQ ID NO: 2268 - DNA, 19 bp, Artificial Sequence
  Synthetic
ccccgcgcgccggggcagg

SEQ ID NO: 2269 - DNA, 19 bp, Artificial Sequence
  Synthetic
tccccgcgcgccggggcag

SEQ ID NO: 2270 - DNA, 19 bp, Artificial Sequence
  Synthetic
atccccgcgcgccggggca

SEQ ID NO: 2271 - DNA, 19 bp, Artificial Sequence
  Synthetic
aatccccgcgcgccggggc

SEQ ID NO: 2272 - DNA, 19 bp, Artificial Sequence
  Synthetic
aaatccccgcgcgccgggg

SEQ ID NO: 2273 - DNA, 19 bp, Artificial Sequence
  Synthetic
gaaatccccgcgcgccggg

SEQ ID NO: 2274 - DNA, 19 bp, Artificial Sequence
  Synthetic
cgaaatccccgcgcgccgg

SEQ ID NO: 2275 - DNA, 19 bp, Artificial Sequence
  Synthetic
gcgaaatccccgcgcgccg

SEQ ID NO: 2276 - DNA, 19 bp, Artificial Sequence
  Synthetic
ggcgaaatccccgcgcgcc

SEQ ID NO: 2277 - DNA, 19 bp, Artificial Sequence
  Synthetic
aggcgaaatccccgcgcgc

SEQ ID NO: 2278 - DNA, 19 bp, Artificial Sequence
  Synthetic
taggcgaaatccccgcgcg

SEQ ID NO: 2279 - DNA, 19 bp, Artificial Sequence
  Synthetic
gtaggcgaaatccccgcgc

SEQ ID NO: 2280 - DNA, 19 bp, Artificial Sequence
  Synthetic
cgtaggcgaaatccccgcg

SEQ ID NO: 2281 - DNA, 19 bp, Artificial Sequence
  Synthetic
gcgtaggcgaaatccccgc

SEQ ID NO: 2282 - DNA, 19 bp, Artificial Sequence
  Synthetic
ggcgtaggcgaaatccccg

SEQ ID NO: 2283 - DNA, 19 bp, Artificial Sequence
  Synthetic
cggcgtaggcgaaatcccc

SEQ ID NO: 2284 - DNA, 19 bp, Artificial Sequence
  Synthetic
gcggcgtaggcgaaatccc

SEQ ID NO: 2285 - DNA, 19 bp, Artificial Sequence
  Synthetic
ggcggcgtaggcgaaatcc

SEQ ID NO: 2286 - DNA, 19 bp, Artificial Sequence
  Synthetic
gggcggcgtaggcgaaatc

SEQ ID NO: 2287 - DNA, 19 bp, Artificial Sequence
  Synthetic
ggggcggcgtaggcgaaat

SEQ ID NO: 2288 - DNA, 19 bp, Artificial Sequence
  Synthetic
cggggcggcgtaggcgaaa

SEQ ID NO: 2289 - DNA, 19 bp, Artificial Sequence
  Synthetic
ccggggcggcgtaggcgaa

SEQ ID NO: 2290 - DNA, 19 bp, Artificial Sequence
  Synthetic
gccggggcggcgtaggcga

SEQ ID NO: 2291 - DNA, 19 bp, Artificial Sequence
  Synthetic
agccggggcggcgtaggcg

SEQ ID NO: 2292 - DNA, 19 bp, Artificial Sequence
  Synthetic
gagccggggcggcgtaggc

SEQ ID NO: 2293 - DNA, 19 bp, Artificial Sequence
  Synthetic
ggagccggggcggcgtagg

SEQ ID NO: 2294 - DNA, 19 bp, Artificial Sequence
  Synthetic
aggagccggggcggcgtag

SEQ ID NO: 2295 - DNA, 19 bp, Artificial Sequence
  Synthetic
gaggagccggggcggcgta

SEQ ID NO: 2296 - DNA, 19 bp, Artificial Sequence
  Synthetic
ggaggagccggggcggcgt

SEQ ID NO: 2297 - DNA, 19 bp, Artificial Sequence
  Synthetic
cggaggagccggggcggcg

SEQ ID NO: 2298 - DNA, 19 bp, Artificial Sequence
  Synthetic
ccggaggagccggggcggc

SEQ ID NO: 2299 - DNA, 19 bp, Artificial Sequence
  Synthetic
tccggaggagccggggcgg

SEQ ID NO: 2300 - DNA, 19 bp, Artificial Sequence
  Synthetic
gtccggaggagccggggcg

SEQ ID NO: 2301 - DNA, 19 bp, Artificial Sequence
  Synthetic
cgtccggaggagccggggc

SEQ ID NO: 2302 - DNA, 19 bp, Artificial Sequence
  Synthetic
ccgtccggaggagccgggg

SEQ ID NO: 2303 - DNA, 19 bp, Artificial Sequence
  Synthetic
cccgtccggaggagccggg

SEQ ID NO: 2304 - DNA, 19 bp, Artificial Sequence
  Synthetic
ccccgtccggaggagccgg

SEQ ID NO: 2305 - DNA, 19 bp, Artificial Sequence
  Synthetic
gccccgtccggaggagccg

SEQ ID NO: 2306 - DNA, 19 bp, Artificial Sequence
  Synthetic
cgccccgtccggaggagcc

SEQ ID NO: 2307 - DNA, 19 bp, Artificial Sequence
  Synthetic
gcgccccgtccggaggagc

SEQ ID NO: 2308 - DNA, 19 bp, Artificial Sequence
  Synthetic
agcgccccgtccggaggag

SEQ ID NO: 2309 - DNA, 19 bp, Artificial Sequence
  Synthetic
gagcgccccgtccggagga

SEQ ID NO: 2310 - DNA, 19 bp, Artificial Sequence
  Synthetic
agagcgccccgtccggagg

SEQ ID NO: 2311 - DNA, 19 bp, Artificial Sequence
  Synthetic
gagagcgccccgtccggag

SEQ ID NO: 2312 - DNA, 19 bp, Artificial Sequence
  Synthetic
ggagagcgccccgtccgga

SEQ ID NO: 2313 - DNA, 19 bp, Artificial Sequence
  Synthetic
gggagagcgccccgtccgg

SEQ ID NO: 2314 - DNA, 19 bp, Artificial Sequence
  Synthetic
tgggagagcgccccgtccg

SEQ ID NO: 2315 - DNA, 19 bp, Artificial Sequence
  Synthetic
gtgggagagcgccccgtcc

SEQ ID NO: 2316 - DNA, 19 bp, Artificial Sequence
  Synthetic
ggtgggagagcgccccgtc

SEQ ID NO: 2317 - DNA, 19 bp, Artificial Sequence
  Synthetic
gggtgggagagcgccccgt

SEQ ID NO: 2318 - DNA, 19 bp, Artificial Sequence
  Synthetic
agggtgggagagcgccccg

SEQ ID NO: 2319 - DNA, 19 bp, Artificial Sequence
  Synthetic
gagggtgggagagcgcccc

SEQ ID NO: 2320 - DNA, 19 bp, Artificial Sequence
  Synthetic
tgagggtgggagagcgccc

SEQ ID NO: 2321 - DNA, 19 bp, Artificial Sequence
  Synthetic
ctgagggtgggagagcgcc

SEQ ID NO: 2322 - DNA, 19 bp, Artificial Sequence
  Synthetic
cctgagggtgggagagcgc

SEQ ID NO: 2323 - DNA, 19 bp, Artificial Sequence
  Synthetic
gcctgagggtgggagagcg

SEQ ID NO: 2324 - DNA, 19 bp, Artificial Sequence
  Synthetic
agcctgagggtgggagagc

SEQ ID NO: 2325 - DNA, 19 bp, Artificial Sequence
  Synthetic
gagcctgagggtgggagag

SEQ ID NO: 2326 - DNA, 19 bp, Artificial Sequence
  Synthetic
ggagcctgagggtgggaga

SEQ ID NO: 2327 - DNA, 19 bp, Artificial Sequence
  Synthetic
aggagcctgagggtgggag

SEQ ID NO: 2328 - DNA, 19 bp, Artificial Sequence
  Synthetic
gaggagcctgagggtggga

SEQ ID NO: 2329 - DNA, 19 bp, Artificial Sequence
  Synthetic
cgaggagcctgagggtggg

SEQ ID NO: 2330 - DNA, 19 bp, Artificial Sequence
  Synthetic
gcgaggagcctgagggtgg

SEQ ID NO: 2331 - DNA, 19 bp, Artificial Sequence
  Synthetic
agcgaggagcctgagggtg

SEQ ID NO: 2332 - DNA, 19 bp, Artificial Sequence
  Synthetic
cagcgaggagcctgagggt

SEQ ID NO: 2333 - DNA, 19 bp, Artificial Sequence
  Synthetic
ccagcgaggagcctgaggg

SEQ ID NO: 2334 - DNA, 19 bp, Artificial Sequence
  Synthetic
gccagcgaggagcctgagg

SEQ ID NO: 2335 - DNA, 19 bp, Artificial Sequence
  Synthetic
ggccagcgaggagcctgag

SEQ ID NO: 2336 - DNA, 19 bp, Artificial Sequence
  Synthetic
aggccagcgaggagcctga

SEQ ID NO: 2337 - DNA, 19 bp, Artificial Sequence
  Synthetic
gaggccagcgaggagcctg

SEQ ID NO: 2338 - DNA, 19 bp, Artificial Sequence
  Synthetic
ggaggccagcgaggagcct

SEQ ID NO: 2339 - DNA, 19 bp, Artificial Sequence
  Synthetic
cggaggccagcgaggagcc

SEQ ID NO: 2340 - DNA, 19 bp, Artificial Sequence
  Synthetic
gcggaggccagcgaggagc

SEQ ID NO: 2341 - DNA, 19 bp, Artificial Sequence
  Synthetic
tgcggaggccagcgaggag

SEQ ID NO: 2342 - DNA, 19 bp, Artificial Sequence
  Synthetic
gtgcggaggccagcgagga

SEQ ID NO: 2343 - DNA, 19 bp, Artificial Sequence
  Synthetic
ggtgcggaggccagcgagg

SEQ ID NO: 2344 - DNA, 19 bp, Artificial Sequence
  Synthetic
gggtgcggaggccagcgag

SEQ ID NO: 2345 - DNA, 19 bp, Artificial Sequence
  Synthetic
cgggtgcggaggccagcga

SEQ ID NO: 2346 - DNA, 19 bp, Artificial Sequence
  Synthetic
ccgggtgcggaggccagcg

SEQ ID NO: 2347 - DNA, 19 bp, Artificial Sequence
  Synthetic
cccgggtgcggaggccagc

SEQ ID NO: 2348 - DNA, 19 bp, Artificial Sequence
  Synthetic
gcccgggtgcggaggccag

SEQ ID NO: 2349 - DNA, 19 bp, Artificial Sequence
  Synthetic
tgcccgggtgcggaggcca

SEQ ID NO: 2350 - DNA, 19 bp, Artificial Sequence
  Synthetic
ttgcccgggtgcggaggcc

SEQ ID NO: 2351 - DNA, 19 bp, Artificial Sequence
  Synthetic
tttgcccgggtgcggaggc

SEQ ID NO: 2352 - DNA, 19 bp, Artificial Sequence
  Synthetic
ttttgcccgggtgcggagg

SEQ ID NO: 2353 - DNA, 19 bp, Artificial Sequence
  Synthetic
cttttgcccgggtgcggag

SEQ ID NO: 2354 - DNA, 19 bp, Artificial Sequence
  Synthetic
gcttttgcccgggtgcgga

SEQ ID NO: 2355 - DNA, 19 bp, Artificial Sequence
  Synthetic
ggcttttgcccgggtgcgg

SEQ ID NO: 2356 - DNA, 19 bp, Artificial Sequence
  Synthetic
cggcttttgcccgggtgcg

SEQ ID NO: 2357 - DNA, 19 bp, Artificial Sequence
  Synthetic
ccggcttttgcccgggtgc

SEQ ID NO: 2358 - DNA, 19 bp, Artificial Sequence
  Synthetic
cccggcttttgcccgggtg

SEQ ID NO: 2359 - DNA, 19 bp, Artificial Sequence
  Synthetic
tcccggcttttgcccgggt

SEQ ID NO: 2360 - DNA, 19 bp, Artificial Sequence
  Synthetic
ctcccggcttttgcccggg

SEQ ID NO: 2361 - DNA, 19 bp, Artificial Sequence
  Synthetic
cctcccggcttttgcccgg

SEQ ID NO: 2362 - DNA, 19 bp, Artificial Sequence
  Synthetic
tcctcccggcttttgcccg

SEQ ID NO: 2363 - DNA, 19 bp, Artificial Sequence
  Synthetic
gtcctcccggcttttgccc

SEQ ID NO: 2364 - DNA, 19 bp, Artificial Sequence
  Synthetic
ggtcctcccggcttttgcc

SEQ ID NO: 2365 - DNA, 19 bp, Artificial Sequence
  Synthetic
cggtcctcccggcttttgc

SEQ ID NO: 2366 - DNA, 19 bp, Artificial Sequence
  Synthetic
ccggtcctcccggcttttg

SEQ ID NO: 2367 - DNA, 19 bp, Artificial Sequence
  Synthetic
cccggtcctcccggctttt

SEQ ID NO: 2368 - DNA, 19 bp, Artificial Sequence
  Synthetic
tcccggtcctcccggcttt

SEQ ID NO: 2369 - DNA, 19 bp, Artificial Sequence
  Synthetic
gtcccggtcctcccggctt

SEQ ID NO: 2370 - DNA, 19 bp, Artificial Sequence
  Synthetic
ggtcccggtcctcccggct

SEQ ID NO: 2371 - DNA, 19 bp, Artificial Sequence
  Synthetic
gggtcccggtcctcccggc

SEQ ID NO: 2372 - DNA, 19 bp, Artificial Sequence
  Synthetic
cgggtcccggtcctcccgg

SEQ ID NO: 2373 - DNA, 19 bp, Artificial Sequence
  Synthetic
gcgggtcccggtcctcccg

SEQ ID NO: 2374 - DNA, 19 bp, Artificial Sequence
  Synthetic
tgcgggtcccggtcctccc

SEQ ID NO: 2375 - DNA, 19 bp, Artificial Sequence
  Synthetic
ctgcgggtcccggtcctcc

SEQ ID NO: 2376 - DNA, 19 bp, Artificial Sequence
  Synthetic
gctgcgggtcccggtcctc

SEQ ID NO: 2377 - DNA, 19 bp, Artificial Sequence
  Synthetic
cgctgcgggtcccggtcct

SEQ ID NO: 2378 - DNA, 19 bp, Artificial Sequence
  Synthetic
gcgctgcgggtcccggtcc

SEQ ID NO: 2379 - DNA, 19 bp, Artificial Sequence
  Synthetic
cgcgctgcgggtcccggtc

SEQ ID NO: 2380 - DNA, 19 bp, Artificial Sequence
  Synthetic
tcgcgctgcgggtcccggt

SEQ ID NO: 2381 - DNA, 19 bp, Artificial Sequence
  Synthetic
gtcgcgctgcgggtcccgg

SEQ ID NO: 2382 - DNA, 19 bp, Artificial Sequence
  Synthetic
cgtcgcgctgcgggtcccg

SEQ ID NO: 2383 - DNA, 19 bp, Artificial Sequence
  Synthetic
ccgtcgcgctgcgggtccc

SEQ ID NO: 2384 - DNA, 19 bp, Artificial Sequence
  Synthetic
gccgtcgcgctgcgggtcc

SEQ ID NO: 2385 - DNA, 19 bp, Artificial Sequence
  Synthetic
ggccgtcgcgctgcgggtc

SEQ ID NO: 2386 - DNA, 19 bp, Artificial Sequence
  Synthetic
aggccgtcgcgctgcgggt

SEQ ID NO: 2387 - DNA, 19 bp, Artificial Sequence
  Synthetic
caggccgtcgcgctgcggg

SEQ ID NO: 2388 - DNA, 19 bp, Artificial Sequence
  Synthetic
gcaggccgtcgcgctgcgg

SEQ ID NO: 2389 - DNA, 19 bp, Artificial Sequence
  Synthetic
ggcaggccgtcgcgctgcg

SEQ ID NO: 2390 - DNA, 19 bp, Artificial Sequence
  Synthetic
cggcaggccgtcgcgctgc

SEQ ID NO: 2391 - DNA, 19 bp, Artificial Sequence
  Synthetic
ccggcaggccgtcgcgctg

SEQ ID NO: 2392 - DNA, 19 bp, Artificial Sequence
  Synthetic
cccggcaggccgtcgcgct

SEQ ID NO: 2393 - DNA, 19 bp, Artificial Sequence
  Synthetic
gcccggcaggccgtcgcgc

SEQ ID NO: 2394 - DNA, 19 bp, Artificial Sequence
  Synthetic
ggcccggcaggccgtcgcg

SEQ ID NO: 2395 - DNA, 19 bp, Artificial Sequence
  Synthetic
gggcccggcaggccgtcgc

SEQ ID NO: 2396 - DNA, 19 bp, Artificial Sequence
  Synthetic
ggggcccggcaggccgtcg

SEQ ID NO: 2397 - DNA, 19 bp, Artificial Sequence
  Synthetic
aggggcccggcaggccgtc

SEQ ID NO: 2398 - DNA, 19 bp, Artificial Sequence
  Synthetic
caggggcccggcaggccgt

SEQ ID NO: 2399 - DNA, 19 bp, Artificial Sequence
  Synthetic
gcaggggcccggcaggccg

SEQ ID NO: 2400 - DNA, 19 bp, Artificial Sequence
  Synthetic
cgcaggggcccggcaggcc

SEQ ID NO: 2401 - DNA, 19 bp, Artificial Sequence
  Synthetic
gcgcaggggcccggcaggc

SEQ ID NO: 2402 - DNA, 19 bp, Artificial Sequence
  Synthetic
cgcgcaggggcccggcagg

SEQ ID NO: 2403 - DNA, 19 bp, Artificial Sequence
  Synthetic
ccgcgcaggggcccggcag

SEQ ID NO: 2404 - DNA, 19 bp, Artificial Sequence
  Synthetic
accgcgcaggggcccggca

SEQ ID NO: 2405 - DNA, 19 bp, Artificial Sequence
  Synthetic
caccgcgcaggggcccggc

SEQ ID NO: 2406 - DNA, 19 bp, Artificial Sequence
  Synthetic
ccaccgcgcaggggcccgg

SEQ ID NO: 2407 - DNA, 19 bp, Artificial Sequence
  Synthetic
gccaccgcgcaggggcccg

SEQ ID NO: 2408 - DNA, 19 bp, Artificial Sequence
  Synthetic
tgccaccgcgcaggggccc

SEQ ID NO: 2409 - DNA, 19 bp, Artificial Sequence
  Synthetic
gtgccaccgcgcaggggcc

SEQ ID NO: 2410 - DNA, 19 bp, Artificial Sequence
  Synthetic
tgtgccaccgcgcaggggc

SEQ ID NO: 2411 - DNA, 19 bp, Artificial Sequence
  Synthetic
ctgtgccaccgcgcagggg

SEQ ID NO: 2412 - DNA, 19 bp, Artificial Sequence
  Synthetic
gctgtgccaccgcgcaggg

SEQ ID NO: 2413 - DNA, 19 bp, Artificial Sequence
  Synthetic
ggctgtgccaccgcgcagg

SEQ ID NO: 2414 - DNA, 19 bp, Artificial Sequence
  Synthetic
aggctgtgccaccgcgcag

SEQ ID NO: 2415 - DNA, 19 bp, Artificial Sequence
  Synthetic
caggctgtgccaccgcgca

SEQ ID NO: 2416 - DNA, 19 bp, Artificial Sequence
  Synthetic
ccaggctgtgccaccgcgc

SEQ ID NO: 2417 - DNA, 19 bp, Artificial Sequence
  Synthetic
cccaggctgtgccaccgcg

SEQ ID NO: 2418 - DNA, 19 bp, Artificial Sequence
  Synthetic
gcccaggctgtgccaccgc

SEQ ID NO: 2419 - DNA, 19 bp, Artificial Sequence
  Synthetic
ggcccaggctgtgccaccg

SEQ ID NO: 2420 - DNA, 19 bp, Artificial Sequence
  Synthetic
gggcccaggctgtgccacc

SEQ ID NO: 2421 - DNA, 19 bp, Artificial Sequence
  Synthetic
cgggcccaggctgtgccac

SEQ ID NO: 2422 - DNA, 19 bp, Artificial Sequence
  Synthetic
gcgggcccaggctgtgcca

SEQ ID NO: 2423 - DNA, 19 bp, Artificial Sequence
  Synthetic
agcgggcccaggctgtgcc

SEQ ID NO: 2424 - DNA, 19 bp, Artificial Sequence
  Synthetic
gagcgggcccaggctgtgc

SEQ ID NO: 2425 - DNA, 19 bp, Artificial Sequence
  Synthetic
tgagcgggcccaggctgtg

SEQ ID NO: 2426 - DNA, 19 bp, Artificial Sequence
  Synthetic
ttgagcgggcccaggctgt

SEQ ID NO: 2427 - DNA, 19 bp, Artificial Sequence
  Synthetic
cttgagcgggcccaggctg

SEQ ID NO: 2428 - DNA, 19 bp, Artificial Sequence
  Synthetic
gcttgagcgggcccaggct

SEQ ID NO: 2429 - DNA, 19 bp, Artificial Sequence
  Synthetic
cgcttgagcgggcccaggc

SEQ ID NO: 2430 - DNA, 19 bp, Artificial Sequence
  Synthetic
ccgcttgagcgggcccagg

SEQ ID NO: 2431 - DNA, 19 bp, Artificial Sequence
  Synthetic
cccgcttgagcgggcccag

SEQ ID NO: 2432 - DNA, 19 bp, Artificial Sequence
  Synthetic
ccccgcttgagcgggccca

SEQ ID NO: 2433 - DNA, 19 bp, Artificial Sequence
  Synthetic
gccccgcttgagcgggccc

SEQ ID NO: 2434 - DNA, 19 bp, Artificial Sequence
  Synthetic
ggccccgcttgagcgggcc

SEQ ID NO: 2435 - DNA, 19 bp, Artificial Sequence
  Synthetic
cggccccgcttgagcgggc

SEQ ID NO: 2436 - DNA, 19 bp, Artificial Sequence
  Synthetic
gcggccccgcttgagcggg

SEQ ID NO: 2437 - DNA, 19 bp, Artificial Sequence
  Synthetic
tgcggccccgcttgagcgg

SEQ ID NO: 2438 - DNA, 19 bp, Artificial Sequence
  Synthetic
ctgcggccccgcttgagcg

SEQ ID NO: 2439 - DNA, 19 bp, Artificial Sequence
  Synthetic
cctgcggccccgcttgagc

SEQ ID NO: 2440 - DNA, 19 bp, Artificial Sequence
  Synthetic
ccctgcggccccgcttgag

SEQ ID NO: 2441 - DNA, 19 bp, Artificial Sequence
  Synthetic
gccctgcggccccgcttga

SEQ ID NO: 2442 - DNA, 19 bp, Artificial Sequence
  Synthetic
ggccctgcggccccgcttg

SEQ ID NO: 2443 - DNA, 19 bp, Artificial Sequence
  Synthetic
tggccctgcggccccgctt

SEQ ID NO: 2444 - DNA, 19 bp, Artificial Sequence
  Synthetic
ttggccctgcggccccgct

SEQ ID NO: 2445 - DNA, 19 bp, Artificial Sequence
  Synthetic
cttggccctgcggccccgc

SEQ ID NO: 2446 - DNA, 19 bp, Artificial Sequence
  Synthetic
ccttggccctgcggccccg

SEQ ID NO: 2447 - DNA, 19 bp, Artificial Sequence
  Synthetic
cccttggccctgcggcccc

SEQ ID NO: 2448 - DNA, 19 bp, Artificial Sequence
  Synthetic
ccccttggccctgcggccc

SEQ ID NO: 2449 - DNA, 19 bp, Artificial Sequence
  Synthetic
accccttggccctgcggcc

SEQ ID NO: 2450 - DNA, 19 bp, Artificial Sequence
  Synthetic
caccccttggccctgcggc

SEQ ID NO: 2451 - DNA, 19 bp, Artificial Sequence
  Synthetic
gcaccccttggccctgcgg

SEQ ID NO: 2452 - DNA, 19 bp, Artificial Sequence
  Synthetic
agcaccccttggccctgcg

SEQ ID NO: 2453 - DNA, 19 bp, Artificial Sequence
  Synthetic
aagcaccccttggccctgc

SEQ ID NO: 2454 - DNA, 19 bp, Artificial Sequence
  Synthetic
caagcaccccttggccctg

SEQ ID NO: 2455 - DNA, 19 bp, Artificial Sequence
  Synthetic
gcaagcaccccttggccct

SEQ ID NO: 2456 - DNA, 19 bp, Artificial Sequence
  Synthetic
cgcaagcaccccttggccc

SEQ ID NO: 2457 - DNA, 19 bp, Artificial Sequence
  Synthetic
gcgcaagcaccccttggcc

SEQ ID NO: 2458 - DNA, 19 bp, Artificial Sequence
  Synthetic
ggcgcaagcaccccttggc

SEQ ID NO: 2459 - DNA, 19 bp, Artificial Sequence
  Synthetic
tggcgcaagcaccccttgg

SEQ ID NO: 2460 - DNA, 19 bp, Artificial Sequence
  Synthetic
gtggcgcaagcaccccttg

SEQ ID NO: 2461 - DNA, 19 bp, Artificial Sequence
  Synthetic
ggtggcgcaagcacccctt

SEQ ID NO: 2462 - DNA, 19 bp, Artificial Sequence
  Synthetic
gggtggcgcaagcacccct

SEQ ID NO: 2463 - DNA, 19 bp, Artificial Sequence
  Synthetic
tgggtggcgcaagcacccc

SEQ ID NO: 2464 - DNA, 19 bp, Artificial Sequence
  Synthetic
gtgggtggcgcaagcaccc

SEQ ID NO: 2465 - DNA, 19 bp, Artificial Sequence
  Synthetic
cgtgggtggcgcaagcacc

SEQ ID NO: 2466 - DNA, 19 bp, Artificial Sequence
  Synthetic
acgtgggtggcgcaagcac

SEQ ID NO: 2467 - DNA, 19 bp, Artificial Sequence
  Synthetic
gacgtgggtggcgcaagca

SEQ ID NO: 2468 - DNA, 19 bp, Artificial Sequence
  Synthetic
ggacgtgggtggcgcaagc

SEQ ID NO: 2469 - DNA, 19 bp, Artificial Sequence
  Synthetic
gggacgtgggtggcgcaag

SEQ ID NO: 2470 - DNA, 19 bp, Artificial Sequence
  Synthetic
tgggacgtgggtggcgcaa

SEQ ID NO: 2471 - DNA, 19 bp, Artificial Sequence
  Synthetic
ctgggacgtgggtggcgca

SEQ ID NO: 2472 - DNA, 19 bp, Artificial Sequence
  Synthetic
cctgggacgtgggtggcgc

SEQ ID NO: 2473 - DNA, 19 bp, Artificial Sequence
  Synthetic
ccctgggacgtgggtggcg

SEQ ID NO: 2474 - DNA, 19 bp, Artificial Sequence
  Synthetic
cccctgggacgtgggtggc

SEQ ID NO: 2475 - DNA, 19 bp, Artificial Sequence
  Synthetic
tcccctgggacgtgggtgg

SEQ ID NO: 2476 - DNA, 19 bp, Artificial Sequence
  Synthetic
ctcccctgggacgtgggtg

SEQ ID NO: 2477 - DNA, 19 bp, Artificial Sequence
  Synthetic
actcccctgggacgtgggt

SEQ ID NO: 2478 - DNA, 19 bp, Artificial Sequence
  Synthetic
gactcccctgggacgtggg

SEQ ID NO: 2479 - DNA, 19 bp, Artificial Sequence
  Synthetic
ggactcccctgggacgtgg

SEQ ID NO: 2480 - DNA, 19 bp, Artificial Sequence
  Synthetic
cggactcccctgggacgtg

SEQ ID NO: 2481 - DNA, 19 bp, Artificial Sequence
  Synthetic
acggactcccctgggacgt

SEQ ID NO: 2482 - DNA, 19 bp, Artificial Sequence
  Synthetic
cacggactcccctgggacg

SEQ ID NO: 2483 - DNA, 19 bp, Artificial Sequence
  Synthetic
ccacggactcccctgggac

SEQ ID NO: 2484 - DNA, 19 bp, Artificial Sequence
  Synthetic
accacggactcccctggga

SEQ ID NO: 2485 - DNA, 19 bp, Artificial Sequence
  Synthetic
caccacggactcccctggg

SEQ ID NO: 2486 - DNA, 19 bp, Artificial Sequence
  Synthetic
ccaccacggactcccctgg

SEQ ID NO: 2487 - DNA, 19 bp, Artificial Sequence
  Synthetic
cccaccacggactcccctg

SEQ ID NO: 2488 - DNA, 19 bp, Artificial Sequence
  Synthetic
ccccaccacggactcccct

SEQ ID NO: 2489 - DNA, 19 bp, Artificial Sequence
  Synthetic
gccccaccacggactcccc

SEQ ID NO: 2490 - DNA, 19 bp, Artificial Sequence
  Synthetic
agccccaccacggactccc

SEQ ID NO: 2491 - DNA, 19 bp, Artificial Sequence
  Synthetic
cagccccaccacggactcc

SEQ ID NO: 2492 - DNA, 19 bp, Artificial Sequence
  Synthetic
ccagccccaccacggactc

SEQ ID NO: 2493 - DNA, 19 bp, Artificial Sequence
  Synthetic
cccagccccaccacggact

SEQ ID NO: 2494 - DNA, 19 bp, Artificial Sequence
  Synthetic
ccccagccccaccacggac

SEQ ID NO: 2495 - DNA, 19 bp, Artificial Sequence
  Synthetic
gccccagccccaccacgga

SEQ ID NO: 2496 - DNA, 19 bp, Artificial Sequence
  Synthetic
ggccccagccccaccacgg

SEQ ID NO: 2497 - DNA, 19 bp, Artificial Sequence
  Synthetic
cggccccagccccaccacg

SEQ ID NO: 2498 - DNA, 19 bp, Artificial Sequence
  Synthetic
ccggccccagccccaccac

SEQ ID NO: 2499 - DNA, 19 bp, Artificial Sequence
  Synthetic
cccggccccagccccacca

SEQ ID NO: 2500 - DNA, 19 bp, Artificial Sequence
  Synthetic
ccccggccccagccccacc

SEQ ID NO: 2501 - DNA, 19 bp, Artificial Sequence
  Synthetic
accccggccccagccccac

SEQ ID NO: 2502 - DNA, 19 bp, Artificial Sequence
  Synthetic
gaccccggccccagcccca

SEQ ID NO: 2503 - DNA, 19 bp, Artificial Sequence
  Synthetic
ggaccccggccccagcccc

SEQ ID NO: 2504 - DNA, 19 bp, Artificial Sequence
  Synthetic
gggaccccggccccagccc

SEQ ID NO: 2505 - DNA, 19 bp, Artificial Sequence
  Synthetic
ggggaccccggccccagcc

SEQ ID NO: 2506 - DNA, 19 bp, Artificial Sequence
  Synthetic
tggggaccccggccccagc

SEQ ID NO: 2507 - DNA, 19 bp, Artificial Sequence
  Synthetic
ctggggaccccggccccag

SEQ ID NO: 2508 - DNA, 19 bp, Artificial Sequence
  Synthetic
cctggggaccccggcccca

SEQ ID NO: 2509 - DNA, 19 bp, Artificial Sequence
  Synthetic
acctggggaccccggcccc

SEQ ID NO: 2510 - DNA, 19 bp, Artificial Sequence
  Synthetic
gacctggggaccccggccc

SEQ ID NO: 2511 - DNA, 19 bp, Artificial Sequence
  Synthetic
cgacctggggaccccggcc

SEQ ID NO: 2512 - DNA, 19 bp, Artificial Sequence
  Synthetic
gcgacctggggaccccggc

SEQ ID NO: 2513 - DNA, 19 bp, Artificial Sequence
  Synthetic
ggcgacctggggaccccgg

SEQ ID NO: 2514 - DNA, 19 bp, Artificial Sequence
  Synthetic
cggcgacctggggaccccg

SEQ ID NO: 2515 - DNA, 19 bp, Artificial Sequence
  Synthetic
ccggcgacctggggacccc

SEQ ID NO: 2516 - DNA, 19 bp, Artificial Sequence
  Synthetic
cccggcgacctggggaccc

SEQ ID NO: 2517 - DNA, 19 bp, Artificial Sequence
  Synthetic
ccccggcgacctggggacc

SEQ ID NO: 2518 - DNA, 19 bp, Artificial Sequence
  Synthetic
gccccggcgacctggggac

SEQ ID NO: 2519 - DNA, 19 bp, Artificial Sequence
  Synthetic
cgccccggcgacctgggga

SEQ ID NO: 2520 - DNA, 19 bp, Artificial Sequence
  Synthetic
ccgccccggcgacctgggg

SEQ ID NO: 2521 - DNA, 19 bp, Artificial Sequence
  Synthetic
gccgccccggcgacctggg

SEQ ID NO: 2522 - DNA, 19 bp, Artificial Sequence
  Synthetic
cgccgccccggcgacctgg

SEQ ID NO: 2523 - DNA, 19 bp, Artificial Sequence
  Synthetic
acgccgccccggcgacctg

SEQ ID NO: 2524 - DNA, 19 bp, Artificial Sequence
  Synthetic
cacgccgccccggcgacct

SEQ ID NO: 2525 - DNA, 19 bp, Artificial Sequence
  Synthetic
ccacgccgccccggcgacc

SEQ ID NO: 2526 - DNA, 19 bp, Artificial Sequence
  Synthetic
cccacgccgccccggcgac

SEQ ID NO: 2527 - DNA, 19 bp, Artificial Sequence
  Synthetic
tcccacgccgccccggcga

SEQ ID NO: 2528 - DNA, 19 bp, Artificial Sequence
  Synthetic
ttcccacgccgccccggcg

SEQ ID NO: 2529 - DNA, 19 bp, Artificial Sequence
  Synthetic
gttcccacgccgccccggc

SEQ ID NO: 2530 - DNA, 19 bp, Artificial Sequence
  Synthetic
ggttcccacgccgccccgg

SEQ ID NO: 2531 - DNA, 19 bp, Artificial Sequence
  Synthetic
gggttcccacgccgccccg

SEQ ID NO: 2532 - DNA, 19 bp, Artificial Sequence
  Synthetic
ggggttcccacgccgcccc

SEQ ID NO: 2533 - DNA, 19 bp, Artificial Sequence
  Synthetic
tggggttcccacgccgccc

SEQ ID NO: 2534 - DNA, 19 bp, Artificial Sequence
  Synthetic
ttggggttcccacgccgcc

SEQ ID NO: 2535 - DNA, 19 bp, Artificial Sequence
  Synthetic
cttggggttcccacgccgc

SEQ ID NO: 2536 - DNA, 19 bp, Artificial Sequence
  Synthetic
gcttggggttcccacgccg

SEQ ID NO: 2537 - DNA, 19 bp, Artificial Sequence
  Synthetic
ggcttggggttcccacgcc

SEQ ID NO: 2538 - DNA, 19 bp, Artificial Sequence
  Synthetic
cggcttggggttcccacgc

SEQ ID NO: 2539 - DNA, 19 bp, Artificial Sequence
  Synthetic
ccggcttggggttcccacg

SEQ ID NO: 2540 - DNA, 19 bp, Artificial Sequence
  Synthetic
cccggcttggggttcccac

SEQ ID NO: 2541 - DNA, 19 bp, Artificial Sequence
  Synthetic
ccccggcttggggttccca

SEQ ID NO: 2542 - DNA, 19 bp, Artificial Sequence
  Synthetic
gccccggcttggggttccc

SEQ ID NO: 2543 - DNA, 19 bp, Artificial Sequence
  Synthetic
tgccccggcttggggttcc

SEQ ID NO: 2544 - DNA, 19 bp, Artificial Sequence
  Synthetic
ctgccccggcttggggttc

SEQ ID NO: 2545 - DNA, 19 bp, Artificial Sequence
  Synthetic
gctgccccggcttggggtt

SEQ ID NO: 2546 - DNA, 19 bp, Artificial Sequence
  Synthetic
agctgccccggcttggggt

SEQ ID NO: 2547 - DNA, 19 bp, Artificial Sequence
  Synthetic
gagctgccccggcttgggg

SEQ ID NO: 2548 - DNA, 19 bp, Artificial Sequence
  Synthetic
ggagctgccccggcttggg

SEQ ID NO: 2549 - DNA, 19 bp, Artificial Sequence
  Synthetic
tggagctgccccggcttgg

SEQ ID NO: 2550 - DNA, 19 bp, Artificial Sequence
  Synthetic
gtggagctgccccggcttg

SEQ ID NO: 2551 - DNA, 19 bp, Artificial Sequence
  Synthetic
ggtggagctgccccggctt

SEQ ID NO: 2552 - DNA, 19 bp, Artificial Sequence
  Synthetic
aggtggagctgccccggct

SEQ ID NO: 2553 - DNA, 19 bp, Artificial Sequence
  Synthetic
gaggtggagctgccccggc

SEQ ID NO: 2554 - DNA, 19 bp, Artificial Sequence
  Synthetic
ggaggtggagctgccccgg

SEQ ID NO: 2555 - DNA, 19 bp, Artificial Sequence
  Synthetic
gggaggtggagctgccccg

SEQ ID NO: 2556 - DNA, 19 bp, Artificial Sequence
  Synthetic
ggggaggtggagctgcccc

SEQ ID NO: 2557 - DNA, 19 bp, Artificial Sequence
  Synthetic
tggggaggtggagctgccc

SEQ ID NO: 2558 - DNA, 19 bp, Artificial Sequence
  Synthetic
ctggggaggtggagctgcc

SEQ ID NO: 2559 - DNA, 19 bp, Artificial Sequence
  Synthetic
gctggggaggtggagctgc

SEQ ID NO: 2560 - DNA, 19 bp, Artificial Sequence
  Synthetic
ggctggggaggtggagctg

SEQ ID NO: 2561 - DNA, 19 bp, Artificial Sequence
  Synthetic
gggctggggaggtggagct

SEQ ID NO: 2562 - DNA, 19 bp, Artificial Sequence
  Synthetic
cgggctggggaggtggagc

SEQ ID NO: 2563 - DNA, 19 bp, Artificial Sequence
  Synthetic
gcgggctggggaggtggag

SEQ ID NO: 2564 - DNA, 19 bp, Artificial Sequence
  Synthetic
cgcgggctggggaggtgga

SEQ ID NO: 2565 - DNA, 19 bp, Artificial Sequence
  Synthetic
gcgcgggctggggaggtgg

SEQ ID NO: 2566 - DNA, 19 bp, Artificial Sequence
  Synthetic
ggcgcgggctggggaggtg

SEQ ID NO: 2567 - DNA, 19 bp, Artificial Sequence
  Synthetic
gggcgcgggctggggaggt

SEQ ID NO: 2568 - DNA, 19 bp, Artificial Sequence
  Synthetic
ggggcgcgggctggggagg

SEQ ID NO: 2569 - DNA, 19 bp, Artificial Sequence
  Synthetic
gggggcgcgggctggggag

SEQ ID NO: 2570 - DNA, 19 bp, Artificial Sequence
  Synthetic
cgggggcgcgggctgggga

SEQ ID NO: 2571 - DNA, 19 bp, Artificial Sequence
  Synthetic
ccgggggcgcgggctgggg

SEQ ID NO: 2572 - DNA, 19 bp, Artificial Sequence
  Synthetic
tccgggggcgcgggctggg

SEQ ID NO: 2573 - DNA, 19 bp, Artificial Sequence
  Synthetic
gtccgggggcgcgggctgg

SEQ ID NO: 2574 - DNA, 19 bp, Artificial Sequence
  Synthetic
cgtccgggggcgcgggctg

SEQ ID NO: 2575 - DNA, 19 bp, Artificial Sequence
  Synthetic
gcgtccgggggcgcgggct

SEQ ID NO: 2576 - DNA, 19 bp, Artificial Sequence
  Synthetic
ggcgtccgggggcgcgggc

SEQ ID NO: 2577 - DNA, 19 bp, Artificial Sequence
  Synthetic
aggcgtccgggggcgcggg

SEQ ID NO: 2578 - DNA, 19 bp, Artificial Sequence
  Synthetic
gaggcgtccgggggcgcgg

SEQ ID NO: 2579 - DNA, 19 bp, Artificial Sequence
  Synthetic
ggaggcgtccgggggcgcg

SEQ ID NO: 2580 - DNA, 19 bp, Artificial Sequence
  Synthetic
cggaggcgtccgggggcgc

SEQ ID NO: 2581 - DNA, 19 bp, Artificial Sequence
  Synthetic
gcggaggcgtccgggggcg

SEQ ID NO: 2582 - DNA, 19 bp, Artificial Sequence
  Synthetic
ggcggaggcgtccgggggc

SEQ ID NO: 2583 - DNA, 19 bp, Artificial Sequence
  Synthetic
aggcggaggcgtccggggg

SEQ ID NO: 2584 - DNA, 19 bp, Artificial Sequence
  Synthetic
gaggcggaggcgtccgggg

SEQ ID NO: 2585 - DNA, 19 bp, Artificial Sequence
  Synthetic
ggaggcggaggcgtccggg

SEQ ID NO: 2586 - DNA, 19 bp, Artificial Sequence
  Synthetic
cggaggcggaggcgtccgg

SEQ ID NO: 2587 - DNA, 19 bp, Artificial Sequence
  Synthetic
gcggaggcggaggcgtccg

SEQ ID NO: 2588 - DNA, 19 bp, Artificial Sequence
  Synthetic
cgcggaggcggaggcgtcc

SEQ ID NO: 2589 - DNA, 19 bp, Artificial Sequence
  Synthetic
gcgcggaggcggaggcgtc

SEQ ID NO: 2590 - DNA, 19 bp, Artificial Sequence
  Synthetic
cgcgcggaggcggaggcgt

SEQ ID NO: 2591 - DNA, 19 bp, Artificial Sequence
  Synthetic
ccgcgcggaggcggaggcg

SEQ ID NO: 2592 - DNA, 19 bp, Artificial Sequence
  Synthetic
gccgcgcggaggcggaggc

SEQ ID NO: 2593 - DNA, 19 bp, Artificial Sequence
  Synthetic
tgccgcgcggaggcggagg

SEQ ID NO: 2594 - DNA, 19 bp, Artificial Sequence
  Synthetic
ctgccgcgcggaggcggag

SEQ ID NO: 2595 - DNA, 19 bp, Artificial Sequence
  Synthetic
cctgccgcgcggaggcgga

SEQ ID NO: 2596 - DNA, 19 bp, Artificial Sequence
  Synthetic
ccctgccgcgcggaggcgg

SEQ ID NO: 2597 - DNA, 19 bp, Artificial Sequence
  Synthetic
cccctgccgcgcggaggcg

SEQ ID NO: 2598 - DNA, 19 bp, Artificial Sequence
  Synthetic
gcccctgccgcgcggaggc

SEQ ID NO: 2599 - DNA, 19 bp, Artificial Sequence
  Synthetic
tgcccctgccgcgcggagg

SEQ ID NO: 2600 - DNA, 19 bp, Artificial Sequence
  Synthetic
ctgcccctgccgcgcggag

SEQ ID NO: 2601 - DNA, 19 bp, Artificial Sequence
  Synthetic
tctgcccctgccgcgcgga

SEQ ID NO: 2602 - DNA, 19 bp, Artificial Sequence
  Synthetic
atctgcccctgccgcgcgg

SEQ ID NO: 2603 - DNA, 19 bp, Artificial Sequence
  Synthetic
catctgcccctgccgcgcg

SEQ ID NO: 2604 - DNA, 19 bp, Artificial Sequence
  Synthetic
gcatctgcccctgccgcgc

SEQ ID NO: 2605 - DNA, 19 bp, Artificial Sequence
  Synthetic
tgcatctgcccctgccgcg

SEQ ID NO: 2606 - DNA, 19 bp, Artificial Sequence
  Synthetic
ttgcatctgcccctgccgc

SEQ ID NO: 2607 - DNA, 19 bp, Artificial Sequence
  Synthetic
cttgcatctgcccctgccg

SEQ ID NO: 2608 - DNA, 19 bp, Artificial Sequence
  Synthetic
ccttgcatctgcccctgcc

SEQ ID NO: 2609 - DNA, 19 bp, Artificial Sequence
  Synthetic
gccttgcatctgcccctgc

SEQ ID NO: 2610 - DNA, 19 bp, Artificial Sequence
  Synthetic
tgccttgcatctgcccctg

SEQ ID NO: 2611 - DNA, 19 bp, Artificial Sequence
  Synthetic
atgccttgcatctgcccct

SEQ ID NO: 2612 - DNA, 19 bp, Artificial Sequence
  Synthetic
gatgccttgcatctgcccc

SEQ ID NO: 2613 - DNA, 19 bp, Artificial Sequence
  Synthetic
ggatgccttgcatctgccc

SEQ ID NO: 2614 - DNA, 19 bp, Artificial Sequence
  Synthetic
gggatgccttgcatctgcc

SEQ ID NO: 2615 - DNA, 19 bp, Artificial Sequence
  Synthetic
cgggatgccttgcatctgc

SEQ ID NO: 2616 - DNA, 19 bp, Artificial Sequence
  Synthetic
ccgggatgccttgcatctg

SEQ ID NO: 2617 - DNA, 19 bp, Artificial Sequence
  Synthetic
gccgggatgccttgcatct

SEQ ID NO: 2618 - DNA, 19 bp, Artificial Sequence
  Synthetic
cgccgggatgccttgcatc

SEQ ID NO: 2619 - DNA, 19 bp, Artificial Sequence
  Synthetic
gcgccgggatgccttgcat

SEQ ID NO: 2620 - DNA, 19 bp, Artificial Sequence
  Synthetic
ggcgccgggatgccttgca

SEQ ID NO: 2621 - DNA, 19 bp, Artificial Sequence
  Synthetic
gggcgccgggatgccttgc

SEQ ID NO: 2622 - DNA, 19 bp, Artificial Sequence
  Synthetic
agggcgccgggatgccttg

SEQ ID NO: 2623 - DNA, 19 bp, Artificial Sequence
  Synthetic
gagggcgccgggatgcctt

SEQ ID NO: 2624 - DNA, 19 bp, Artificial Sequence
  Synthetic
ggagggcgccgggatgcct

SEQ ID NO: 2625 - DNA, 19 bp, Artificial Sequence
  Synthetic
gggagggcgccgggatgcc

SEQ ID NO: 2626 - DNA, 19 bp, Artificial Sequence
  Synthetic
tgggagggcgccgggatgc

SEQ ID NO: 2627 - DNA, 19 bp, Artificial Sequence
  Synthetic
ctgggagggcgccgggatg

SEQ ID NO: 2628 - DNA, 19 bp, Artificial Sequence
  Synthetic
cctgggagggcgccgggat

SEQ ID NO: 2629 - DNA, 19 bp, Artificial Sequence
  Synthetic
gcctgggagggcgccggga

SEQ ID NO: 2630 - DNA, 19 bp, Artificial Sequence
  Synthetic
cgcctgggagggcgccggg

SEQ ID NO: 2631 - DNA, 19 bp, Artificial Sequence
  Synthetic
gcgcctgggagggcgccgg

SEQ ID NO: 2632 - DNA, 19 bp, Artificial Sequence
  Synthetic
agcgcctgggagggcgccg

SEQ ID NO: 2633 - DNA, 19 bp, Artificial Sequence
  Synthetic
gagcgcctgggagggcgcc

SEQ ID NO: 2634 - DNA, 19 bp, Artificial Sequence
  Synthetic
ggagcgcctgggagggcgc

SEQ ID NO: 2635 - DNA, 19 bp, Artificial Sequence
  Synthetic
tggagcgcctgggagggcg

SEQ ID NO: 2636 - DNA, 19 bp, Artificial Sequence
  Synthetic
ctggagcgcctgggagggc

SEQ ID NO: 2637 - DNA, 19 bp, Artificial Sequence
  Synthetic
cctggagcgcctgggaggg

SEQ ID NO: 2638 - DNA, 19 bp, Artificial Sequence
  Synthetic
tcctggagcgcctgggagg

SEQ ID NO: 2639 - DNA, 19 bp, Artificial Sequence
  Synthetic
ctcctggagcgcctgggag

SEQ ID NO: 2640 - DNA, 19 bp, Artificial Sequence
  Synthetic
gctcctggagcgcctggga

SEQ ID NO: 2641 - DNA, 19 bp, Artificial Sequence
  Synthetic
ggctcctggagcgcctggg

SEQ ID NO: 2642 - DNA, 19 bp, Artificial Sequence
  Synthetic
cggctcctggagcgcctgg

SEQ ID NO: 2643 - DNA, 19 bp, Artificial Sequence
  Synthetic
ccggctcctggagcgcctg

SEQ ID NO: 2644 - DNA, 19 bp, Artificial Sequence
  Synthetic
gccggctcctggagcgcct

SEQ ID NO: 2645 - DNA, 19 bp, Artificial Sequence
  Synthetic
cgccggctcctggagcgcc

SEQ ID NO: 2646 - DNA, 19 bp, Artificial Sequence
  Synthetic
gcgccggctcctggagcgc

SEQ ID NO: 2647 - DNA, 19 bp, Artificial Sequence
  Synthetic
ggcgccggctcctggagcg

SEQ ID NO: 2648 - DNA, 19 bp, Artificial Sequence
  Synthetic
gggcgccggctcctggagc

SEQ ID NO: 2649 - DNA, 19 bp, Artificial Sequence
  Synthetic
agggcgccggctcctggag

SEQ ID NO: 2650 - DNA, 19 bp, Artificial Sequence
  Synthetic
cagggcgccggctcctgga

SEQ ID NO: 2651 - DNA, 19 bp, Artificial Sequence
  Synthetic
ccagggcgccggctcctgg

SEQ ID NO: 2652 - DNA, 19 bp, Artificial Sequence
  Synthetic
accagggcgccggctcctg

SEQ ID NO: 2653 - DNA, 19 bp, Artificial Sequence
  Synthetic
gaccagggcgccggctcct

SEQ ID NO: 2654 - DNA, 19 bp, Artificial Sequence
  Synthetic
agaccagggcgccggctcc

SEQ ID NO: 2655 - DNA, 19 bp, Artificial Sequence
  Synthetic
cagaccagggcgccggctc

SEQ ID NO: 2656 - DNA, 19 bp, Artificial Sequence
  Synthetic
gcagaccagggcgccggct

SEQ ID NO: 2657 - DNA, 19 bp, Artificial Sequence
  Synthetic
tgcagaccagggcgccggc

SEQ ID NO: 2658 - DNA, 19 bp, Artificial Sequence
  Synthetic
gtgcagaccagggcgccgg

SEQ ID NO: 2659 - DNA, 19 bp, Artificial Sequence
  Synthetic
agtgcagaccagggcgccg

SEQ ID NO: 2660 - DNA, 19 bp, Artificial Sequence
  Synthetic
gagtgcagaccagggcgcc

SEQ ID NO: 2661 - DNA, 19 bp, Artificial Sequence
  Synthetic
ggagtgcagaccagggcgc

SEQ ID NO: 2662 - DNA, 19 bp, Artificial Sequence
  Synthetic
gggagtgcagaccagggcg

SEQ ID NO: 2663 - DNA, 19 bp, Artificial Sequence
  Synthetic
ggggagtgcagaccagggc

SEQ ID NO: 2664 - DNA, 19 bp, Artificial Sequence
  Synthetic
aggggagtgcagaccaggg

SEQ ID NO: 2665 - DNA, 19 bp, Artificial Sequence
  Synthetic
caggggagtgcagaccagg

SEQ ID NO: 2666 - DNA, 19 bp, Artificial Sequence
  Synthetic
gcaggggagtgcagaccag

SEQ ID NO: 2667 - DNA, 19 bp, Artificial Sequence
  Synthetic
cgcaggggagtgcagacca

SEQ ID NO: 2668 - DNA, 19 bp, Artificial Sequence
  Synthetic
ccgcaggggagtgcagacc

SEQ ID NO: 2669 - DNA, 19 bp, Artificial Sequence
  Synthetic
gccgcaggggagtgcagac

SEQ ID NO: 2670 - DNA, 19 bp, Artificial Sequence
  Synthetic
ggccgcaggggagtgcaga

SEQ ID NO: 2671 - DNA, 19 bp, Artificial Sequence
  Synthetic
aggccgcaggggagtgcag

SEQ ID NO: 2672 - DNA, 19 bp, Artificial Sequence
  Synthetic
caggccgcaggggagtgca

SEQ ID NO: 2673 - DNA, 19 bp, Artificial Sequence
  Synthetic
gcaggccgcaggggagtgc

SEQ ID NO: 2674 - DNA, 19 bp, Artificial Sequence
  Synthetic
agcaggccgcaggggagtg

SEQ ID NO: 2675 - DNA, 19 bp, Artificial Sequence
  Synthetic
cagcaggccgcaggggagt

SEQ ID NO: 2676 - DNA, 19 bp, Artificial Sequence
  Synthetic
gcagcaggccgcaggggag

SEQ ID NO: 2677 - DNA, 19 bp, Artificial Sequence
  Synthetic
agcagcaggccgcagggga

SEQ ID NO: 2678 - DNA, 19 bp, Artificial Sequence
  Synthetic
cagcagcaggccgcagggg

SEQ ID NO: 2679 - DNA, 19 bp, Artificial Sequence
  Synthetic
ccagcagcaggccgcaggg

SEQ ID NO: 2680 - DNA, 19 bp, Artificial Sequence
  Synthetic
tccagcagcaggccgcagg

SEQ ID NO: 2681 - DNA, 19 bp, Artificial Sequence
  Synthetic
atccagcagcaggccgcag

SEQ ID NO: 2682 - DNA, 19 bp, Artificial Sequence
  Synthetic
catccagcagcaggccgca

SEQ ID NO: 2683 - DNA, 19 bp, Artificial Sequence
  Synthetic
tcatccagcagcaggccgc

SEQ ID NO: 2684 - DNA, 19 bp, Artificial Sequence
  Synthetic
ctcatccagcagcaggccg

SEQ ID NO: 2685 - DNA, 19 bp, Artificial Sequence
  Synthetic
gctcatccagcagcaggcc

SEQ ID NO: 2686 - DNA, 19 bp, Artificial Sequence
  Synthetic
agctcatccagcagcaggc

SEQ ID NO: 2687 - DNA, 19 bp, Artificial Sequence
  Synthetic
gagctcatccagcagcagg

SEQ ID NO: 2688 - DNA, 19 bp, Artificial Sequence
  Synthetic
ggagctcatccagcagcag

SEQ ID NO: 2689 - DNA, 19 bp, Artificial Sequence
  Synthetic
aggagctcatccagcagca

SEQ ID NO: 2690 - DNA, 19 bp, Artificial Sequence
  Synthetic
caggagctcatccagcagc

SEQ ID NO: 2691 - DNA, 19 bp, Artificial Sequence
  Synthetic
ccaggagctcatccagcag

SEQ ID NO: 2692 - DNA, 19 bp, Artificial Sequence
  Synthetic
gccaggagctcatccagca

SEQ ID NO: 2693 - DNA, 19 bp, Artificial Sequence
  Synthetic
cgccaggagctcatccagc

SEQ ID NO: 2694 - DNA, 19 bp, Artificial Sequence
  Synthetic
tcgccaggagctcatccag

SEQ ID NO: 2695 - DNA, 19 bp, Artificial Sequence
  Synthetic
ctcgccaggagctcatcca

SEQ ID NO: 2696 - DNA, 19 bp, Artificial Sequence
  Synthetic
gctcgccaggagctcatcc

SEQ ID NO: 2697 - DNA, 19 bp, Artificial Sequence
  Synthetic
ggctcgccaggagctcatc

SEQ ID NO: 2698 - DNA, 19 bp, Artificial Sequence
  Synthetic
gggctcgccaggagctcat

SEQ ID NO: 2699 - DNA, 19 bp, Artificial Sequence
  Synthetic
cgggctcgccaggagctca

SEQ ID NO: 2700 - DNA, 19 bp, Artificial Sequence
  Synthetic
ccgggctcgccaggagctc

SEQ ID NO: 2701 - DNA, 19 bp, Artificial Sequence
  Synthetic
tccgggctcgccaggagct

SEQ ID NO: 2702 - DNA, 19 bp, Artificial Sequence
  Synthetic
ctccgggctcgccaggagc

SEQ ID NO: 2703 - DNA, 19 bp, Artificial Sequence
  Synthetic
actccgggctcgccaggag

SEQ ID NO: 2704 - DNA, 19 bp, Artificial Sequence
  Synthetic
aactccgggctcgccagga

SEQ ID NO: 2705 - DNA, 19 bp, Artificial Sequence
  Synthetic
aaactccgggctcgccagg

SEQ ID NO: 2706 - DNA, 19 bp, Artificial Sequence
  Synthetic
gaaactccgggctcgccag

SEQ ID NO: 2707 - DNA, 19 bp, Artificial Sequence
  Synthetic
agaaactccgggctcgcca

SEQ ID NO: 2708 - DNA, 19 bp, Artificial Sequence
  Synthetic
cagaaactccgggctcgcc

SEQ ID NO: 2709 - DNA, 19 bp, Artificial Sequence
  Synthetic
gcagaaactccgggctcgc

SEQ ID NO: 2710 - DNA, 19 bp, Artificial Sequence
  Synthetic
tgcagaaactccgggctcg

SEQ ID NO: 2711 - DNA, 19 bp, Artificial Sequence
  Synthetic
ctgcagaaactccgggctc

SEQ ID NO: 2712 - DNA, 19 bp, Artificial Sequence
  Synthetic
gctgcagaaactccgggct

SEQ ID NO: 2713 - DNA, 19 bp, Artificial Sequence
  Synthetic
tgctgcagaaactccgggc

SEQ ID NO: 2714 - DNA, 19 bp, Artificial Sequence
  Synthetic
ctgctgcagaaactccggg

SEQ ID NO: 2715 - DNA, 19 bp, Artificial Sequence
  Synthetic
cctgctgcagaaactccgg

SEQ ID NO: 2716 - DNA, 19 bp, Artificial Sequence
  Synthetic
gcctgctgcagaaactccg

SEQ ID NO: 2717 - DNA, 19 bp, Artificial Sequence
  Synthetic
cgcctgctgcagaaactcc

SEQ ID NO: 2718 - DNA, 19 bp, Artificial Sequence
  Synthetic
gcgcctgctgcagaaactc

SEQ ID NO: 2719 - DNA, 19 bp, Artificial Sequence
  Synthetic
tgcgcctgctgcagaaact

SEQ ID NO: 2720 - DNA, 19 bp, Artificial Sequence
  Synthetic
ttgcgcctgctgcagaaac

SEQ ID NO: 2721 - DNA, 19 bp, Artificial Sequence
  Synthetic
gttgcgcctgctgcagaaa

SEQ ID NO: 2722 - DNA, 19 bp, Artificial Sequence
  Synthetic
ggttgcgcctgctgcagaa

SEQ ID NO: 2723 - DNA, 19 bp, Artificial Sequence
  Synthetic
aggttgcgcctgctgcaga

SEQ ID NO: 2724 - DNA, 19 bp, Artificial Sequence
  Synthetic
gaggttgcgcctgctgcag

SEQ ID NO: 2725 - DNA, 19 bp, Artificial Sequence
  Synthetic
agaggttgcgcctgctgca

SEQ ID NO: 2726 - DNA, 19 bp, Artificial Sequence
  Synthetic
gagaggttgcgcctgctgc

SEQ ID NO: 2727 - DNA, 19 bp, Artificial Sequence
  Synthetic
ggagaggttgcgcctgctg

SEQ ID NO: 2728 - DNA, 19 bp, Artificial Sequence
  Synthetic
aggagaggttgcgcctgct

SEQ ID NO: 2729 - DNA, 19 bp, Artificial Sequence
  Synthetic
taggagaggttgcgcctgc

SEQ ID NO: 2730 - DNA, 19 bp, Artificial Sequence
  Synthetic
ctaggagaggttgcgcctg

SEQ ID NO: 2731 - DNA, 19 bp, Artificial Sequence
  Synthetic
tctaggagaggttgcgcct

SEQ ID NO: 2732 - DNA, 19 bp, Artificial Sequence
  Synthetic
ttctaggagaggttgcgcc

SEQ ID NO: 2733 - DNA, 19 bp, Artificial Sequence
  Synthetic
tttctaggagaggttgcgc

SEQ ID NO: 2734 - DNA, 19 bp, Artificial Sequence
  Synthetic
gtttctaggagaggttgcg

SEQ ID NO: 2735 - DNA, 19 bp, Artificial Sequence
  Synthetic
cgtttctaggagaggttgc

SEQ ID NO: 2736 - DNA, 19 bp, Artificial Sequence
  Synthetic
ccgtttctaggagaggttg

SEQ ID NO: 2737 - DNA, 19 bp, Artificial Sequence
  Synthetic
tccgtttctaggagaggtt

SEQ ID NO: 2738 - DNA, 19 bp, Artificial Sequence
  Synthetic
ctccgtttctaggagaggt

SEQ ID NO: 2739 - DNA, 19 bp, Artificial Sequence
  Synthetic
cctccgtttctaggagagg

SEQ ID NO: 2740 - DNA, 19 bp, Artificial Sequence
  Synthetic
gcctccgtttctaggagag

SEQ ID NO: 2741 - DNA, 19 bp, Artificial Sequence
  Synthetic
ggcctccgtttctaggaga

SEQ ID NO: 2742 - DNA, 19 bp, Artificial Sequence
  Synthetic
gggcctccgtttctaggag

SEQ ID NO: 2743 - DNA, 19 bp, Artificial Sequence
  Synthetic
ggggcctccgtttctagga

SEQ ID NO: 2744 - DNA, 19 bp, Artificial Sequence
  Synthetic
cggggcctccgtttctagg

SEQ ID NO: 2745 - DNA, 19 bp, Artificial Sequence
  Synthetic
ccggggcctccgtttctag

SEQ ID NO: 2746 - DNA, 19 bp, Artificial Sequence
  Synthetic
cccggggcctccgtttcta

SEQ ID NO: 2747 - DNA, 19 bp, Artificial Sequence
  Synthetic
ccccggggcctccgtttct

SEQ ID NO: 2748 - DNA, 19 bp, Artificial Sequence
  Synthetic
cccccggggcctccgtttc

SEQ ID NO: 2749 - DNA, 19 bp, Artificial Sequence
  Synthetic
tcccccggggcctccgttt

SEQ ID NO: 2750 - DNA, 19 bp, Artificial Sequence
  Synthetic
ctcccccggggcctccgtt

SEQ ID NO: 2751 - DNA, 19 bp, Artificial Sequence
  Synthetic
gctcccccggggcctccgt

SEQ ID NO: 2752 - DNA, 19 bp, Artificial Sequence
  Synthetic
agctcccccggggcctccg

SEQ ID NO: 2753 - DNA, 19 bp, Artificial Sequence
  Synthetic
cagctcccccggggcctcc

SEQ ID NO: 2754 - DNA, 19 bp, Artificial Sequence
  Synthetic
ccagctcccccggggcctc

SEQ ID NO: 2755 - DNA, 19 bp, Artificial Sequence
  Synthetic
tccagctcccccggggcct

SEQ ID NO: 2756 - DNA, 19 bp, Artificial Sequence
  Synthetic
ctccagctcccccggggcc

SEQ ID NO: 2757 - DNA, 19 bp, Artificial Sequence
  Synthetic
cctccagctcccccggggc

SEQ ID NO: 2758 - DNA, 19 bp, Artificial Sequence
  Synthetic
gcctccagctcccccgggg

SEQ ID NO: 2759 - DNA, 19 bp, Artificial Sequence
  Synthetic
ggcctccagctcccccggg

SEQ ID NO: 2760 - DNA, 19 bp, Artificial Sequence
  Synthetic
aggcctccagctcccccgg

SEQ ID NO: 2761 - DNA, 19 bp, Artificial Sequence
  Synthetic
gaggcctccagctcccccg

SEQ ID NO: 2762 - DNA, 19 bp, Artificial Sequence
  Synthetic
cgaggcctccagctccccc

SEQ ID NO: 2763 - DNA, 19 bp, Artificial Sequence
  Synthetic
ccgaggcctccagctcccc

SEQ ID NO: 2764 - DNA, 19 bp, Artificial Sequence
  Synthetic
tccgaggcctccagctccc

SEQ ID NO: 2765 - DNA, 19 bp, Artificial Sequence
  Synthetic
ttccgaggcctccagctcc

SEQ ID NO: 2766 - DNA, 19 bp, Artificial Sequence
  Synthetic
cttccgaggcctccagctc

SEQ ID NO: 2767 - DNA, 19 bp, Artificial Sequence
  Synthetic
tcttccgaggcctccagct

SEQ ID NO: 2768 - DNA, 19 bp, Artificial Sequence
  Synthetic
ctcttccgaggcctccagc

SEQ ID NO: 2769 - DNA, 19 bp, Artificial Sequence
  Synthetic
cctcttccgaggcctccag

SEQ ID NO: 2770 - DNA, 19 bp, Artificial Sequence
  Synthetic
gcctcttccgaggcctcca

SEQ ID NO: 2771 - DNA, 19 bp, Artificial Sequence
  Synthetic
ggcctcttccgaggcctcc

SEQ ID NO: 2772 - DNA, 19 bp, Artificial Sequence
  Synthetic
cggcctcttccgaggcctc

SEQ ID NO: 2773 - DNA, 19 bp, Artificial Sequence
  Synthetic
gcggcctcttccgaggcct

SEQ ID NO: 2774 - DNA, 19 bp, Artificial Sequence
  Synthetic
ggcggcctcttccgaggcc

SEQ ID NO: 2775 - DNA, 19 bp, Artificial Sequence
  Synthetic
aggcggcctcttccgaggc

SEQ ID NO: 2776 - DNA, 19 bp, Artificial Sequence
  Synthetic
gaggcggcctcttccgagg

SEQ ID NO: 2777 - DNA, 19 bp, Artificial Sequence
  Synthetic
cgaggcggcctcttccgag

SEQ ID NO: 2778 - DNA, 19 bp, Artificial Sequence
  Synthetic
gcgaggcggcctcttccga

SEQ ID NO: 2779 - DNA, 19 bp, Artificial Sequence
  Synthetic
agcgaggcggcctcttccg

SEQ ID NO: 2780 - DNA, 19 bp, Artificial Sequence
  Synthetic
cagcgaggcggcctcttcc

SEQ ID NO: 2781 - DNA, 19 bp, Artificial Sequence
  Synthetic
ccagcgaggcggcctcttc

SEQ ID NO: 2782 - DNA, 19 bp, Artificial Sequence
  Synthetic
tccagcgaggcggcctctt

SEQ ID NO: 2783 - DNA, 19 bp, Artificial Sequence
  Synthetic
ttccagcgaggcggcctct

SEQ ID NO: 2784 - DNA, 19 bp, Artificial Sequence
  Synthetic
cttccagcgaggcggcctc

SEQ ID NO: 2785 - DNA, 19 bp, Artificial Sequence
  Synthetic
gcttccagcgaggcggcct

SEQ ID NO: 2786 - DNA, 19 bp, Artificial Sequence
  Synthetic
tgcttccagcgaggcggcc

SEQ ID NO: 2787 - DNA, 19 bp, Artificial Sequence
  Synthetic
gtgcttccagcgaggcggc

SEQ ID NO: 2788 - DNA, 19 bp, Artificial Sequence
  Synthetic
ggtgcttccagcgaggcgg

SEQ ID NO: 2789 - DNA, 19 bp, Artificial Sequence
  Synthetic
gggtgcttccagcgaggcg

SEQ ID NO: 2790 - DNA, 19 bp, Artificial Sequence
  Synthetic
ggggtgcttccagcgaggc

SEQ ID NO: 2791 - DNA, 19 bp, Artificial Sequence
  Synthetic
aggggtgcttccagcgagg

SEQ ID NO: 2792 - DNA, 19 bp, Artificial Sequence
  Synthetic
gaggggtgcttccagcgag

SEQ ID NO: 2793 - DNA, 19 bp, Artificial Sequence
  Synthetic
tgaggggtgcttccagcga

SEQ ID NO: 2794 - DNA, 19 bp, Artificial Sequence
  Synthetic
ctgaggggtgcttccagcg

SEQ ID NO: 2795 - DNA, 19 bp, Artificial Sequence
  Synthetic
gctgaggggtgcttccagc

SEQ ID NO: 2796 - DNA, 19 bp, Artificial Sequence
  Synthetic
cgctgaggggtgcttccag

SEQ ID NO: 2797 - DNA, 19 bp, Artificial Sequence
  Synthetic
tcgctgaggggtgcttcca

SEQ ID NO: 2798 - DNA, 19 bp, Artificial Sequence
  Synthetic
ctcgctgaggggtgcttcc

SEQ ID NO: 2799 - DNA, 19 bp, Artificial Sequence
  Synthetic
cctcgctgaggggtgcttc

SEQ ID NO: 2800 - DNA, 19 bp, Artificial Sequence
  Synthetic
tcctcgctgaggggtgctt

SEQ ID NO: 2801 - DNA, 19 bp, Artificial Sequence
  Synthetic
ttcctcgctgaggggtgct

SEQ ID NO: 2802 - DNA, 19 bp, Artificial Sequence
  Synthetic
cttcctcgctgaggggtgc

SEQ ID NO: 2803 - DNA, 19 bp, Artificial Sequence
  Synthetic
tcttcctcgctgaggggtg

SEQ ID NO: 2804 - DNA, 19 bp, Artificial Sequence
  Synthetic
ttcttcctcgctgaggggt

SEQ ID NO: 2805 - DNA, 19 bp, Artificial Sequence
  Synthetic
attcttcctcgctgagggg

SEQ ID NO: 2806 - DNA, 19 bp, Artificial Sequence
  Synthetic
tattcttcctcgctgaggg

SEQ ID NO: 2807 - DNA, 19 bp, Artificial Sequence
  Synthetic
gtattcttcctcgctgagg

SEQ ID NO: 2808 - DNA, 19 bp, Artificial Sequence
  Synthetic
ggtattcttcctcgctgag

SEQ ID NO: 2809 - DNA, 19 bp, Artificial Sequence
  Synthetic
cggtattcttcctcgctga

SEQ ID NO: 2810 - DNA, 19 bp, Artificial Sequence
  Synthetic
ccggtattcttcctcgctg

SEQ ID NO: 2811 - DNA, 19 bp, Artificial Sequence
  Synthetic
cccggtattcttcctcgct

SEQ ID NO: 2812 - DNA, 19 bp, Artificial Sequence
  Synthetic
gcccggtattcttcctcgc

SEQ ID NO: 2813 - DNA, 19 bp, Artificial Sequence
  Synthetic
agcccggtattcttcctcg

SEQ ID NO: 2814 - DNA, 19 bp, Artificial Sequence
  Synthetic
gagcccggtattcttcctc

SEQ ID NO: 2815 - DNA, 19 bp, Artificial Sequence
  Synthetic
agagcccggtattcttcct

SEQ ID NO: 2816 - DNA, 19 bp, Artificial Sequence
  Synthetic
cagagcccggtattcttcc

SEQ ID NO: 2817 - DNA, 19 bp, Artificial Sequence
  Synthetic
gcagagcccggtattcttc

SEQ ID NO: 2818 - DNA, 19 bp, Artificial Sequence
  Synthetic
agcagagcccggtattctt

SEQ ID NO: 2819 - DNA, 19 bp, Artificial Sequence
  Synthetic
cagcagagcccggtattct

SEQ ID NO: 2820 - DNA, 19 bp, Artificial Sequence
  Synthetic
ccagcagagcccggtattc

SEQ ID NO: 2821 - DNA, 19 bp, Artificial Sequence
  Synthetic
tccagcagagcccggtatt

SEQ ID NO: 2822 - DNA, 19 bp, Artificial Sequence
  Synthetic
ctccagcagagcccggtat

SEQ ID NO: 2823 - DNA, 19 bp, Artificial Sequence
  Synthetic
cctccagcagagcccggta

SEQ ID NO: 2824 - DNA, 19 bp, Artificial Sequence
  Synthetic
tcctccagcagagcccggt

SEQ ID NO: 2825 - DNA, 19 bp, Artificial Sequence
  Synthetic
ctcctccagcagagcccgg

SEQ ID NO: 2826 - DNA, 19 bp, Artificial Sequence
  Synthetic
gctcctccagcagagcccg

SEQ ID NO: 2827 - DNA, 19 bp, Artificial Sequence
  Synthetic
agctcctccagcagagccc

SEQ ID NO: 2828 - DNA, 19 bp, Artificial Sequence
  Synthetic
aagctcctccagcagagcc

SEQ ID NO: 2829 - DNA, 19 bp, Artificial Sequence
  Synthetic
aaagctcctccagcagagc

SEQ ID NO: 2830 - DNA, 19 bp, Artificial Sequence
  Synthetic
taaagctcctccagcagag

SEQ ID NO: 2831 - DNA, 19 bp, Artificial Sequence
  Synthetic
ctaaagctcctccagcaga

SEQ ID NO: 2832 - DNA, 19 bp, Artificial Sequence
  Synthetic
cctaaagctcctccagcag

SEQ ID NO: 2833 - DNA, 19 bp, Artificial Sequence
  Synthetic
tcctaaagctcctccagca

SEQ ID NO: 2834 - DNA, 19 bp, Artificial Sequence
  Synthetic
gtcctaaagctcctccagc

SEQ ID NO: 2835 - DNA, 19 bp, Artificial Sequence
  Synthetic
tgttccccgcgaaagagag

SEQ ID NO: 2836 - DNA, 19 bp, Artificial Sequence
  Synthetic
gtgttccccgcgaaagaga

SEQ ID NO: 2837 - DNA, 19 bp, Artificial Sequence
  Synthetic
ggtgttccccgcgaaagag

SEQ ID NO: 2838 - DNA, 19 bp, Artificial Sequence
  Synthetic
aggtgttccccgcgaaaga

SEQ ID NO: 2839 - DNA, 19 bp, Artificial Sequence
  Synthetic
caggtgttccccgcgaaag

SEQ ID NO: 2840 - DNA, 19 bp, Artificial Sequence
  Synthetic
ccaggtgttccccgcgaaa

SEQ ID NO: 2841 - DNA, 19 bp, Artificial Sequence
  Synthetic
gccaggtgttccccgcgaa

SEQ ID NO: 2842 - DNA, 19 bp, Artificial Sequence
  Synthetic
agccaggtgttccccgcga

SEQ ID NO: 2843 - DNA, 19 bp, Artificial Sequence
  Synthetic
cagccaggtgttccccgcg

SEQ ID NO: 2844 - DNA, 19 bp, Artificial Sequence
  Synthetic
ccagccaggtgttccccgc

SEQ ID NO: 2845 - DNA, 19 bp, Artificial Sequence
  Synthetic
gccagccaggtgttccccg

SEQ ID NO: 2846 - DNA, 19 bp, Artificial Sequence
  Synthetic
agccagccaggtgttcccc

SEQ ID NO: 2847 - DNA, 19 bp, Artificial Sequence
  Synthetic
tagccagccaggtgttccc

SEQ ID NO: 2848 - DNA, 19 bp, Artificial Sequence
  Synthetic
gtagccagccaggtgttcc

SEQ ID NO: 2849 - DNA, 19 bp, Artificial Sequence
  Synthetic
cgtagccagccaggtgttc

SEQ ID NO: 2850 - DNA, 19 bp, Artificial Sequence
  Synthetic
ccgtagccagccaggtgtt

SEQ ID NO: 2851 - DNA, 19 bp, Artificial Sequence
  Synthetic
tccgtagccagccaggtgt

SEQ ID NO: 2852 - DNA, 19 bp, Artificial Sequence
  Synthetic
ctccgtagccagccaggtg

SEQ ID NO: 2853 - DNA, 19 bp, Artificial Sequence
  Synthetic
cctccgtagccagccaggt

SEQ ID NO: 2854 - DNA, 19 bp, Artificial Sequence
  Synthetic
ccctccgtagccagccagg

SEQ ID NO: 2855 - DNA, 19 bp, Artificial Sequence
  Synthetic
cccctccgtagccagccag

SEQ ID NO: 2856 - DNA, 19 bp, Artificial Sequence
  Synthetic
gcccctccgtagccagcca

SEQ ID NO: 2857 - DNA, 19 bp, Artificial Sequence
  Synthetic
cgcccctccgtagccagcc

SEQ ID NO: 2858 - DNA, 19 bp, Artificial Sequence
  Synthetic
acgcccctccgtagccagc

SEQ ID NO: 2859 - DNA, 19 bp, Artificial Sequence
  Synthetic
cacgcccctccgtagccag

SEQ ID NO: 2860 - DNA, 19 bp, Artificial Sequence
  Synthetic
acacgcccctccgtagcca

SEQ ID NO: 2861 - DNA, 19 bp, Artificial Sequence
  Synthetic
gacacgcccctccgtagcc

SEQ ID NO: 2862 - DNA, 19 bp, Artificial Sequence
  Synthetic
agacacgcccctccgtagc

SEQ ID NO: 2863 - DNA, 19 bp, Artificial Sequence
  Synthetic
gagacacgcccctccgtag

SEQ ID NO: 2864 - DNA, 19 bp, Artificial Sequence
  Synthetic
ggagacacgcccctccgta

SEQ ID NO: 2865 - DNA, 19 bp, Artificial Sequence
  Synthetic
cggagacacgcccctccgt

SEQ ID NO: 2866 - DNA, 19 bp, Artificial Sequence
  Synthetic
gcggagacacgcccctccg

SEQ ID NO: 2867 - DNA, 19 bp, Artificial Sequence
  Synthetic
ggcggagacacgcccctcc

SEQ ID NO: 2868 - DNA, 19 bp, Artificial Sequence
  Synthetic
gggcggagacacgcccctc

SEQ ID NO: 2869 - DNA, 19 bp, Artificial Sequence
  Synthetic
ggggcggagacacgcccct

SEQ ID NO: 2870 - DNA, 19 bp, Artificial Sequence
  Synthetic
cggggcggagacacgcccc

SEQ ID NO: 2871 - DNA, 19 bp, Artificial Sequence
  Synthetic
gcggggcggagacacgccc

SEQ ID NO: 2872 - DNA, 19 bp, Artificial Sequence
  Synthetic
ggcggggcggagacacgcc

SEQ ID NO: 2873 - DNA, 19 bp, Artificial Sequence
  Synthetic
gggcggggcggagacacgc

SEQ ID NO: 2874 - DNA, 19 bp, Artificial Sequence
  Synthetic
ggggcggggcggagacacg

SEQ ID NO: 2875 - DNA, 19 bp, Artificial Sequence
  Synthetic
gggggcggggcggagacac

SEQ ID NO: 2876 - DNA, 19 bp, Artificial Sequence
  Synthetic
agggggcggggcggagaca

SEQ ID NO: 2877 - DNA, 19 bp, Artificial Sequence
  Synthetic
gagggggcggggcggagac

SEQ ID NO: 2878 - DNA, 19 bp, Artificial Sequence
  Synthetic
ggagggggcggggcggaga

SEQ ID NO: 2879 - DNA, 19 bp, Artificial Sequence
  Synthetic
tggagggggcggggcggag

SEQ ID NO: 2880 - DNA, 19 bp, Artificial Sequence
  Synthetic
gtggagggggcggggcgga

SEQ ID NO: 2881 - DNA, 19 bp, Artificial Sequence
  Synthetic
ggtggagggggcggggcgg

SEQ ID NO: 2882 - DNA, 19 bp, Artificial Sequence
  Synthetic
cggtggagggggcggggcg

SEQ ID NO: 2883 - DNA, 19 bp, Artificial Sequence
  Synthetic
ccggtggagggggcggggc

SEQ ID NO: 2884 - DNA, 19 bp, Artificial Sequence
  Synthetic
cccggtggagggggcgggg

SEQ ID NO: 2885 - DNA, 19 bp, Artificial Sequence
  Synthetic
gcccggtggagggggcggg

SEQ ID NO: 2886 - DNA, 19 bp, Artificial Sequence
  Synthetic
agcccggtggagggggcgg

SEQ ID NO: 2887 - DNA, 19 bp, Artificial Sequence
  Synthetic
cagcccggtggagggggcg

SEQ ID NO: 2888 - DNA, 19 bp, Artificial Sequence
  Synthetic
tcagcccggtggagggggc

SEQ ID NO: 2889 - DNA, 19 bp, Artificial Sequence
  Synthetic
gtcagcccggtggaggggg

SEQ ID NO: 2890 - DNA, 19 bp, Artificial Sequence
  Synthetic
ggtcagcccggtggagggg

SEQ ID NO: 2891 - DNA, 19 bp, Artificial Sequence
  Synthetic
cggtcagcccggtggaggg

SEQ ID NO: 2892 - DNA, 19 bp, Artificial Sequence
  Synthetic
ccggtcagcccggtggagg

SEQ ID NO: 2893 - DNA, 19 bp, Artificial Sequence
  Synthetic
gccggtcagcccggtggag

SEQ ID NO: 2894 - DNA, 19 bp, Artificial Sequence
  Synthetic
ggccggtcagcccggtgga

SEQ ID NO: 2895 - DNA, 19 bp, Artificial Sequence
  Synthetic
aggccggtcagcccggtgg

SEQ ID NO: 2896 - DNA, 19 bp, Artificial Sequence
  Synthetic
caggccggtcagcccggtg

SEQ ID NO: 2897 - DNA, 19 bp, Artificial Sequence
  Synthetic
ccaggccggtcagcccggt

SEQ ID NO: 2898 - DNA, 19 bp, Artificial Sequence
  Synthetic
cccaggccggtcagcccgg

SEQ ID NO: 2899 - DNA, 19 bp, Artificial Sequence
  Synthetic
tcccaggccggtcagcccg

SEQ ID NO: 2900 - DNA, 19 bp, Artificial Sequence
  Synthetic
atcccaggccggtcagccc

SEQ ID NO: 2901 - DNA, 19 bp, Artificial Sequence
  Synthetic
aatcccaggccggtcagcc

SEQ ID NO: 2902 - DNA, 19 bp, Artificial Sequence
  Synthetic
gaatcccaggccggtcagc

SEQ ID NO: 2903 - DNA, 19 bp, Artificial Sequence
  Synthetic
ggaatcccaggccggtcag

SEQ ID NO: 2904 - DNA, 19 bp, Artificial Sequence
  Synthetic
aggaatcccaggccggtca

SEQ ID NO: 2905 - DNA, 19 bp, Artificial Sequence
  Synthetic
caggaatcccaggccggtc

SEQ ID NO: 2906 - DNA, 19 bp, Artificial Sequence
  Synthetic
gcaggaatcccaggccggt

SEQ ID NO: 2907 - DNA, 19 bp, Artificial Sequence
  Synthetic
ggcaggaatcccaggccgg

SEQ ID NO: 2908 - DNA, 19 bp, Artificial Sequence
  Synthetic
aggcaggaatcccaggccg

SEQ ID NO: 2909 - DNA, 19 bp, Artificial Sequence
  Synthetic
aaggcaggaatcccaggcc

SEQ ID NO: 2910 - DNA, 19 bp, Artificial Sequence
  Synthetic
gaaggcaggaatcccaggc

SEQ ID NO: 2911 - DNA, 19 bp, Artificial Sequence
  Synthetic
agaaggcaggaatcccagg

SEQ ID NO: 2912 - DNA, 19 bp, Artificial Sequence
  Synthetic
tagaaggcaggaatcccag

SEQ ID NO: 2913 - DNA, 19 bp, Artificial Sequence
  Synthetic
ctagaaggcaggaatccca

SEQ ID NO: 2914 - DNA, 19 bp, Artificial Sequence
  Synthetic
cctagaaggcaggaatccc

SEQ ID NO: 2915 - DNA, 19 bp, Artificial Sequence
  Synthetic
acctagaaggcaggaatcc

SEQ ID NO: 2916 - DNA, 19 bp, Artificial Sequence
  Synthetic
gacctagaaggcaggaatc

SEQ ID NO: 2917 - DNA, 19 bp, Artificial Sequence
  Synthetic
agacctagaaggcaggaat

SEQ ID NO: 2918 - DNA, 19 bp, Artificial Sequence
  Synthetic
tagacctagaaggcaggaa

SEQ ID NO: 2919 - DNA, 19 bp, Artificial Sequence
  Synthetic
ctagacctagaaggcagga

SEQ ID NO: 2920 - DNA, 19 bp, Artificial Sequence
  Synthetic
cctagacctagaaggcagg

SEQ ID NO: 2921 - DNA, 19 bp, Artificial Sequence
  Synthetic
gcctagacctagaaggcag

SEQ ID NO: 2922 - DNA, 19 bp, Artificial Sequence
  Synthetic
ggcctagacctagaaggca

SEQ ID NO: 2923 - DNA, 19 bp, Artificial Sequence
  Synthetic
gggcctagacctagaaggc

SEQ ID NO: 2924 - DNA, 19 bp, Artificial Sequence
  Synthetic
cgggcctagacctagaagg

SEQ ID NO: 2925 - DNA, 19 bp, Artificial Sequence
  Synthetic
ccgggcctagacctagaag

SEQ ID NO: 2926 - DNA, 19 bp, Artificial Sequence
  Synthetic
accgggcctagacctagaa

SEQ ID NO: 2927 - DNA, 19 bp, Artificial Sequence
  Synthetic
caccgggcctagacctaga

SEQ ID NO: 2928 - DNA, 19 bp, Artificial Sequence
  Synthetic
tcaccgggcctagacctag

SEQ ID NO: 2929 - DNA, 19 bp, Artificial Sequence
  Synthetic
ctcaccgggcctagaccta

SEQ ID NO: 2930 - DNA, 19 bp, Artificial Sequence
  Synthetic
tctcaccgggcctagacct

SEQ ID NO: 2931 - DNA, 19 bp, Artificial Sequence
  Synthetic
ctctcaccgggcctagacc

SEQ ID NO: 2932 - DNA, 19 bp, Artificial Sequence
  Synthetic
tctctcaccgggcctagac

SEQ ID NO: 2933 - DNA, 19 bp, Artificial Sequence
  Synthetic
gtctctcaccgggcctaga

SEQ ID NO: 2934 - DNA, 19 bp, Artificial Sequence
  Synthetic
agtctctcaccgggcctag

SEQ ID NO: 2935 - DNA, 19 bp, Artificial Sequence
  Synthetic
gagtctctcaccgggccta

SEQ ID NO: 2936 - DNA, 19 bp, Artificial Sequence
  Synthetic
ggagtctctcaccgggcct

SEQ ID NO: 2937 - DNA, 19 bp, Artificial Sequence
  Synthetic
tggagtctctcaccgggcc

SEQ ID NO: 2938 - DNA, 19 bp, Artificial Sequence
  Synthetic
gtggagtctctcaccgggc

SEQ ID NO: 2939 - DNA, 19 bp, Artificial Sequence
  Synthetic
tgtggagtctctcaccggg

SEQ ID NO: 2940 - DNA, 19 bp, Artificial Sequence
  Synthetic
gtgtggagtctctcaccgg

SEQ ID NO: 2941 - DNA, 19 bp, Artificial Sequence
  Synthetic
ggtgtggagtctctcaccg

SEQ ID NO: 2942 - DNA, 19 bp, Artificial Sequence
  Synthetic
cggtgtggagtctctcacc

SEQ ID NO: 2943 - DNA, 19 bp, Artificial Sequence
  Synthetic
gcggtgtggagtctctcac

SEQ ID NO: 2944 - DNA, 19 bp, Artificial Sequence
  Synthetic
cgcggtgtggagtctctca

SEQ ID NO: 2945 - DNA, 19 bp, Artificial Sequence
  Synthetic
ccgcggtgtggagtctctc

SEQ ID NO: 2946 - DNA, 19 bp, Artificial Sequence
  Synthetic
tccgcggtgtggagtctct

SEQ ID NO: 2947 - DNA, 19 bp, Artificial Sequence
  Synthetic
ctccgcggtgtggagtctc

SEQ ID NO: 2948 - DNA, 19 bp, Artificial Sequence
  Synthetic
tctccgcggtgtggagtct

SEQ ID NO: 2949 - DNA, 19 bp, Artificial Sequence
  Synthetic
ttctccgcggtgtggagtc

SEQ ID NO: 2950 - DNA, 19 bp, Artificial Sequence
  Synthetic
gttctccgcggtgtggagt

SEQ ID NO: 2951 - DNA, 19 bp, Artificial Sequence
  Synthetic
agttctccgcggtgtggag

SEQ ID NO: 2952 - DNA, 19 bp, Artificial Sequence
  Synthetic
cagttctccgcggtgtgga

SEQ ID NO: 2953 - DNA, 19 bp, Artificial Sequence
  Synthetic
gcagttctccgcggtgtgg

SEQ ID NO: 2954 - DNA, 19 bp, Artificial Sequence
  Synthetic
ggcagttctccgcggtgtg

SEQ ID NO: 2955 - DNA, 19 bp, Artificial Sequence
  Synthetic
tggcagttctccgcggtgt

SEQ ID NO: 2956 - DNA, 19 bp, Artificial Sequence
  Synthetic
atggcagttctccgcggtg

SEQ ID NO: 2957 - DNA, 19 bp, Artificial Sequence
  Synthetic
aatggcagttctccgcggt

SEQ ID NO: 2958 - DNA, 19 bp, Artificial Sequence
  Synthetic
gaatggcagttctccgcgg

SEQ ID NO: 2959 - DNA, 19 bp, Artificial Sequence
  Synthetic
agaatggcagttctccgcg

SEQ ID NO: 2960 - DNA, 19 bp, Artificial Sequence
  Synthetic
aagaatggcagttctccgc

SEQ ID NO: 2961 - DNA, 19 bp, Artificial Sequence
  Synthetic
aaagaatggcagttctccg

SEQ ID NO: 2962 - DNA, 19 bp, Artificial Sequence
  Synthetic
gaaagaatggcagttctcc

SEQ ID NO: 2963 - DNA, 19 bp, Artificial Sequence
  Synthetic
ggaaagaatggcagttctc

SEQ ID NO: 2964 - DNA, 19 bp, Artificial Sequence
  Synthetic
aggaaagaatggcagttct

SEQ ID NO: 2965 - DNA, 19 bp, Artificial Sequence
  Synthetic
caggaaagaatggcagttc

SEQ ID NO: 2966 - DNA, 19 bp, Artificial Sequence
  Synthetic
ccaggaaagaatggcagtt

SEQ ID NO: 2967 - DNA, 19 bp, Artificial Sequence
  Synthetic
cccaggaaagaatggcagt

SEQ ID NO: 2968 - DNA, 19 bp, Artificial Sequence
  Synthetic
gcccaggaaagaatggcag

SEQ ID NO: 2969 - DNA, 19 bp, Artificial Sequence
  Synthetic
tgcccaggaaagaatggca

SEQ ID NO: 2970 - DNA, 19 bp, Artificial Sequence
  Synthetic
atgcccaggaaagaatggc

SEQ ID NO: 2971 - DNA, 19 bp, Artificial Sequence
  Synthetic
gatgcccaggaaagaatgg

SEQ ID NO: 2972 - DNA, 19 bp, Artificial Sequence
  Synthetic
ggatgcccaggaaagaatg

SEQ ID NO: 2973 - DNA, 19 bp, Artificial Sequence
  Synthetic
gggatgcccaggaaagaat

SEQ ID NO: 2974 - DNA, 19 bp, Artificial Sequence
  Synthetic
cgggatgcccaggaaagaa

SEQ ID NO: 2975 - DNA, 19 bp, Artificial Sequence
  Synthetic
ccgggatgcccaggaaaga

SEQ ID NO: 2976 - DNA, 19 bp, Artificial Sequence
  Synthetic
cccgggatgcccaggaaag

SEQ ID NO: 2977 - DNA, 19 bp, Artificial Sequence
  Synthetic
ccccgggatgcccaggaaa

SEQ ID NO: 2978 - DNA, 19 bp, Artificial Sequence
  Synthetic
tccccgggatgcccaggaa

SEQ ID NO: 2979 - DNA, 19 bp, Artificial Sequence
  Synthetic
atccccgggatgcccagga

SEQ ID NO: 2980 - DNA, 19 bp, Artificial Sequence
  Synthetic
gatccccgggatgcccagg

SEQ ID NO: 2981 - DNA, 19 bp, Artificial Sequence
  Synthetic
ggatccccgggatgcccag

SEQ ID NO: 2982 - DNA, 19 bp, Artificial Sequence
  Synthetic
gggatccccgggatgccca

SEQ ID NO: 2983 - DNA, 19 bp, Artificial Sequence
  Synthetic
tgggatccccgggatgccc

SEQ ID NO: 2984 - DNA, 19 bp, Artificial Sequence
  Synthetic
ctgggatccccgggatgcc

SEQ ID NO: 2985 - DNA, 19 bp, Artificial Sequence
  Synthetic
tctgggatccccgggatgc

SEQ ID NO: 2986 - DNA, 19 bp, Artificial Sequence
  Synthetic
ctataggatccacagggag

SEQ ID NO: 2987 - RNA, 21 nt, Artificial Sequence
  Synthetic
gcgacggagacucguuuggac

SEQ ID NO: 2988 - RNA, 21 nt, Artificial Sequence
  Synthetic
cgacggagacucguuuggacc

SEQ ID NO: 2989 - RNA, 21 nt, Artificial Sequence
  Synthetic
gacggagacucguuuggaccc

SEQ ID NO: 2990 - RNA, 21 nt, Artificial Sequence
  Synthetic
gcccugcgagccugcuuugag

SEQ ID NO: 2991 - RNA, 21 nt, Artificial Sequence
  Synthetic
ugcgagccugcuuugagcgga

SEQ ID NO: 2992 - RNA, 21 nt, Artificial Sequence
  Synthetic
ggcccaggccaucggcauucc

SEQ ID NO: 2993 - RNA, 21 nt, Artificial Sequence
  Synthetic
ggagcccaggguccagauuug

SEQ ID NO: 2994 - RNA, 21 nt, Artificial Sequence
  Synthetic
agcccaggguccagauuuggu

SEQ ID NO: 2995 - RNA, 21 nt, Artificial Sequence
  Synthetic
gauuugguuucagaaugagag

SEQ ID NO: 2996 - RNA, 21 nt, Artificial Sequence
  Synthetic
ugaggcagcaccggcgggaau

SEQ ID NO: 2997 - RNA, 21 nt, Artificial Sequence
  Synthetic
ucaccggaucccagaccgccc

SEQ ID NO: 2998 - RNA, 21 nt, Artificial Sequence
  Synthetic
gcccugcuccuccgagccuuu

SEQ ID NO: 2999 - RNA, 21 nt, Artificial Sequence
  Synthetic
ccgagccuuugagaaggaucg

SEQ ID NO: 3000 - RNA, 21 nt, Artificial Sequence
  Synthetic
uuugagaaggaucgcuuucca

SEQ ID NO: 3001 - RNA, 21 nt, Artificial Sequence
  Synthetic
ggaucgcuuuccaggcaucgc

SEQ ID NO: 3002 - RNA, 21 nt, Artificial Sequence
  Synthetic
gagacgggccucccggagucc

SEQ ID NO: 3003 - RNA, 21 nt, Artificial Sequence
  Synthetic
ccucccggaguccaggauuca

SEQ ID NO: 3004 - RNA, 21 nt, Artificial Sequence
  Synthetic
cucccggaguccaggauucag

SEQ ID NO: 3005 - RNA, 21 nt, Artificial Sequence
  Synthetic
gggccaggcacccgggacagg

SEQ ID NO: 3006 - RNA, 21 nt, Artificial Sequence
  Synthetic
cacccucaggcuccucgcugg

SEQ ID NO: 3007 - RNA, 21 nt, Artificial Sequence
  Synthetic
ccuccgcacccgggcaaaagc

SEQ ID NO: 3008 - RNA, 21 nt, Artificial Sequence
  Synthetic
gggcaaaagccgggaggaccg

SEQ ID NO: 3009 - RNA, 21 nt, Artificial Sequence
  Synthetic
uccuggcgagcccggaguuuc

SEQ ID NO: 3010 - RNA, 21 nt, Artificial Sequence
  Synthetic
cuggcgagcccggaguuucug

SEQ ID NO: 3011 - RNA, 21 nt, Artificial Sequence
  Synthetic
gagcccggaguuucugcagca

SEQ ID NO: 3012 - RNA, 21 nt, Artificial Sequence
  Synthetic
caggcgcaaccucuccuagaa

SEQ ID NO: 3013 - RNA, 21 nt, Artificial Sequence
  Synthetic
aggcgcaaccucuccuagaaa

SEQ ID NO: 3014 - RNA, 21 nt, Artificial Sequence
  Synthetic
ggcgcaaccucuccuagaaac

SEQ ID NO: 3015 - RNA, 21 nt, Artificial Sequence
  Synthetic
gcgcaaccucuccuagaaacg

SEQ ID NO: 3016 - RNA, 21 nt, Artificial Sequence
  Synthetic
cgcaaccucuccuagaaacgg

SEQ ID NO: 3017 - RNA, 21 nt, Artificial Sequence
  Synthetic
gcaaccucuccuagaaacgga

SEQ ID NO: 3018 - RNA, 21 nt, Artificial Sequence
  Synthetic
agaggccgccucgcuggaagc

SEQ ID NO: 3019 - RNA, 21 nt, Artificial Sequence
  Synthetic
accccucagcgaggaagaaua

SEQ ID NO: 3020 - RNA, 21 nt, Artificial Sequence
  Synthetic
ccccucagcgaggaagaauac

SEQ ID NO: 3021 - RNA, 21 nt, Artificial Sequence
  Synthetic
cucagcgaggaagaauaccgg

SEQ ID NO: 3022 - RNA, 21 nt, Artificial Sequence
  Synthetic
ucuaggcccggugagagacuc

SEQ ID NO: 3023 - RNA, 21 nt, Artificial Sequence
  Synthetic
cggugagagacuccacaccgc

SEQ ID NO: 3024 - RNA, 21 nt, Artificial Sequence
  Synthetic
ccgcggagaacugccauucuu

SEQ ID NO: 3025 - RNA, 21 nt, Artificial Sequence
  Synthetic
cugccauucuuuccugggcau

SEQ ID NO: 3026 - RNA, 21 nt, Artificial Sequence
  Synthetic
ccauucuuuccugggcauccc

SEQ ID NO: 3027 - RNA, 23 nt, Artificial Sequence
  Synthetic
guccaaacgagucuccgucgccg

SEQ ID NO: 3028 - RNA, 23 nt, Artificial Sequence
  Synthetic
gguccaaacgagucuccgucgcc

SEQ ID NO: 3029 - RNA, 23 nt, Artificial Sequence
  Synthetic
ggguccaaacgagucuccgucgc

SEQ ID NO: 3030 - RNA, 23 nt, Artificial Sequence
  Synthetic
cucaaagcaggcucgcagggccu

SEQ ID NO: 3031 - RNA, 23 nt, Artificial Sequence
  Synthetic
uccgcucaaagcaggcucgcagg

SEQ ID NO: 3032 - RNA, 23 nt, Artificial Sequence
  Synthetic
ggaaugccgauggccugggccag

SEQ ID NO: 3033 - RNA, 23 nt, Artificial Sequence
  Synthetic
caaaucuggacccugggcuccgg

SEQ ID NO: 3034 - RNA, 23 nt, Artificial Sequence
  Synthetic
accaaaucuggacccugggcucc

SEQ ID NO: 3035 - RNA, 23 nt, Artificial Sequence
  Synthetic
cucucauucugaaaccaaaucug

SEQ ID NO: 3036 - RNA, 23 nt, Artificial Sequence
  Synthetic
auucccgccggugcugccucagc

SEQ ID NO: 3037 - RNA, 23 nt, Artificial Sequence
  Synthetic
gggcggucugggauccggugacg

SEQ ID NO: 3038 - RNA, 23 nt, Artificial Sequence
  Synthetic
aaaggcucggaggagcagggcgg

SEQ ID NO: 3039 - RNA, 23 nt, Artificial Sequence
  Synthetic
cgauccuucucaaaggcucggag

SEQ ID NO: 3040 - RNA, 23 nt, Artificial Sequence
  Synthetic
uggaaagcgauccuucucaaagg

SEQ ID NO: 3041 - RNA, 23 nt, Artificial Sequence
  Synthetic
gcgaugccuggaaagcgauccuu

SEQ ID NO: 3042 - RNA, 23 nt, Artificial Sequence
  Synthetic
ggacuccgggaggcccgucucuc

SEQ ID NO: 3043 - RNA, 23 nt, Artificial Sequence
  Synthetic
ugaauccuggacuccgggaggcc

SEQ ID NO: 3044 - RNA, 23 nt, Artificial Sequence
  Synthetic
cugaauccuggacuccgggaggc

SEQ ID NO: 3045 - RNA, 23 nt, Artificial Sequence
  Synthetic
ccugucccgggugccuggcccuu

SEQ ID NO: 3046 - RNA, 23 nt, Artificial Sequence
  Synthetic
ccagcgaggagccugaggguggg

SEQ ID NO: 3047 - RNA, 23 nt, Artificial Sequence
  Synthetic
gcuuuugcccgggugcggaggcc

SEQ ID NO: 3048 - RNA, 23 nt, Artificial Sequence
  Synthetic
cgguccucccggcuuuugcccgg

SEQ ID NO: 3049 - RNA, 23 nt, Artificial Sequence
  Synthetic
gaaacuccgggcucgccaggagc

SEQ ID NO: 3050 - RNA, 23 nt, Artificial Sequence
  Synthetic
cagaaacuccgggcucgccagga

SEQ ID NO: 3051 - RNA, 23 nt, Artificial Sequence
  Synthetic
ugcugcagaaacuccgggcucgc

SEQ ID NO: 3052 - RNA, 23 nt, Artificial Sequence
  Synthetic
uucuaggagagguugcgccugcu

SEQ ID NO: 3053 - RNA, 23 nt, Artificial Sequence
  Synthetic
uuucuaggagagguugcgccugc

SEQ ID NO: 3054 - RNA, 23 nt, Artificial Sequence
  Synthetic
guuucuaggagagguugcgccug

SEQ ID NO: 3055 - RNA, 23 nt, Artificial Sequence
  Synthetic
cguuucuaggagagguugcgccu

SEQ ID NO: 3056 - RNA, 23 nt, Artificial Sequence
  Synthetic
ccguuucuaggagagguugcgcc

SEQ ID NO: 3057 - RNA, 23 nt, Artificial Sequence
  Synthetic
uccguuucuaggagagguugcgc

SEQ ID NO: 3058 - RNA, 23 nt, Artificial Sequence
  Synthetic
gcuuccagcgaggcggccucuuc

SEQ ID NO: 3059 - RNA, 23 nt, Artificial Sequence
  Synthetic
uauucuuccucgcugaggggugc

SEQ ID NO: 3060 - RNA, 23 nt, Artificial Sequence
  Synthetic
guauucuuccucgcugaggggug

SEQ ID NO: 3061 - RNA, 23 nt, Artificial Sequence
  Synthetic
ccgguauucuuccucgcugaggg

SEQ ID NO: 3062 - RNA, 23 nt, Artificial Sequence
  Synthetic
gagucucucaccgggccuagacc

SEQ ID NO: 3063 - RNA, 23 nt, Artificial Sequence
  Synthetic
gcgguguggagucucucaccggg

SEQ ID NO: 3064 - RNA, 23 nt, Artificial Sequence
  Synthetic
aagaauggcaguucuccgcggug

SEQ ID NO: 3065 - RNA, 23 nt, Artificial Sequence
  Synthetic
augcccaggaaagaauggcaguu

SEQ ID NO: 3066 - RNA, 23 nt, Artificial Sequence
  Synthetic
gggaugcccaggaaagaauggca

SEQ ID NO: 3067 - RNA, 21 nt, Artificial Sequence
  Synthetic
uccuaugacuguagauuuuau

SEQ ID NO: 3068 - RNA, 23 nt, Artificial Sequence
  Synthetic
auaaaaucuacagucauaggaau

SEQ ID NO: 3069 - RNA, 21 nt, Artificial Sequence
  Synthetic
uguaauaaccauaucuaccuu

SEQ ID NO: 3070 - RNA, 23 nt, Artificial Sequence
  Synthetic
aagguagauaugguuauuacaaa

SEQ ID NO: 3071 - protein, 7 aa, Artificial Sequence
  Synthetic
ASSLNIA

SEQ ID NO: 3072 - protein, 12 aa, Artificial Sequence
  Synthetic
SKTFNTHPQSTP

SEQ ID NO: 3073 - protein, 12 aa, Artificial Sequence
  Synthetic
TARGEHKEEELI

SEQ ID NO: 3074 - protein, 9 aa, Artificial Sequence
  Synthetic
CQAQGQLVC

SEQ ID NO: 3075 - protein, 9 aa, Artificial Sequence
  Synthetic
CSERSMNFC

SEQ ID NO: 3076 - protein, 20 aa, Artificial Sequence
  Synthetic
WLSEAGPVVTVRALRGTGSW

SEQ ID NO: 3077 - protein, 9 aa, Artificial Sequence
  Synthetic
CMQHSMRVC

1. A complex comprising a muscle-targeting agent covalently linked to a oligonucleotide targeting a double homeobox 4 (DUX4) mRNA, wherein the oligonucleotide comprises an antisense strand of 18-25 nucleotides in length and comprises a region of complementarity to a target sequence as set forth in SEQ ID NOs: 356, 501, 1398, 494, 509, 224, 1320, 561, 225, 226, 261, 265, 320, 341, 343, 388, 466, 483, 552, 560, 601, 921, 942, 953, 1294, 1296, 1301, 1321, 1322, 1323, 1324, 1325, 1373, 1394, 1395, 1523, 1531, 1548, 1558, and 1561, and wherein the region of complementarity is at least 16 consecutive nucleosides in length.

2. The complex of claim 1, wherein the muscle-targeting agent is an anti-transferrin receptor (TfR) antibody.

3. The complex of claim 1 or claim 2, wherein the oligonucleotide is an RNAi oligonucleotide.

4. The complex of claim 1 or claim 2, wherein the antisense strand comprises the nucleotide sequence of any one of SEQ ID NOs: 3035, 3040, 3061, 3039, 3041, 3027, 3052, 3044, 3028, 3029, 3030, 3031, 3032, 3033, 3034, 3036, 3037, 3038, 3042, 3043, 3045, 3046, 3047, 3048, 3049, 3050, 3051, 3053, 3054, 3055, 3056, 3057, 3058, 3059, 3060, 3062, 3063, 3064, 3065, and 3066.

5. The complex of any one of claims 1-4, wherein the oligonucleotide further comprises a sense strand which comprises at least 18 consecutive nucleosides complementary to the antisense strand.

6. The complex of any one of claims 1-5, wherein the oligonucleotide comprises one or more modified nucleosides.

7. The complex of claim 6, wherein the one or more modified nucleosides are 2′ modified nucleotides, optionally wherein the one or more 2′ modified nucleosides are selected from: 2′-fluoro (2′-F), 2′-O-methyl (2′-O-Me), 2′-O-methoxyethyl (2′-MOE), 2′-O-aminopropyl (2′-O-AP), 2′-O-dimethylaminoethyl (2′-O-DMAOE), 2′-O-dimethylaminopropyl (2′-O-DMAP), 2′-O-dimethylaminoethyloxyethyl (2′-O-DMAEOE), 2′-O—N-methylacetamido (2′-O-NMA)).

8. The complex of claim 7, wherein each 2′ modified nucleotide is 2′-O-methyl or 2′-fluoro (2′-F).

9. The complex of any one of claims 1-8, wherein the oligonucleotide comprises one or more phosphorothioate internucleoside linkages.

10. The complex of claim 9, wherein the one or more phosphorothioate internucleoside linkage are present on the antisense strand of the oligonucleotide, optionally wherein the two internucleoside linkages at the 3′ end of the antisense strands are phosphorothioate internucleoside linkages.

11. The complex of any one of claims 1-10, wherein one or more cytidines of the oligonucleotide is a 2′-modified 5-methyl-cytidine, optionally wherein the 2′-modified 5-methyl-cytidine is a 2′-O-Me modified 5-methyl-cytidine or a 2′-F modified 5-methyl-cytidine.

12. The complex of any one of claims 1-11, wherein the antisense strand is selected from the modified version of SEQ ID NOs: 3035, 3040, 3061, 3039, 3041, 3027, 3052, 3044, 3028, 3029, 3030, 3031, 3032, 3033, 3034, 3036, 3037, 3038, 3042, 3043, 3045, 3046, 3047, 3048, 3049, 3050, 3051, 3053, 3054, 3055, 3056, 3057, 3058, 3059, 3060, 3062, 3063, 3064, 3065, and 3066 listed in Table 8.

13. The complex of any one of claims 5-12, wherein the sense strand is selected from the modified version of SEQ ID NOs: 2995, 3000, 3021, 2999, 3001, 2987, 3012, 3004, 2988, 2989, 2990, 2991, 2992, 2993, 2994, 2996, 2997, 2998, 3002, 3003, 3005, 3006, 3007, 3008, 3009, 3010, 3011, 3013, 3014, 3015, 3016, 3017, 3018, 3019, 3020, 3022, 3023, 3024, 3025, and 3026 listed in Table 8.

14. The complex of claim 1-13, wherein the oligonucleotide is a siRNA molecule selected from the siRNAs listed in Table 8.

15. The complex of any one of claims 1-11, wherein the antisense strand is selected from the modified version of SEQ ID NOs: 3040, 3061, 3027, 3037, 3039, 3041, 3044, and 3052 listed in Table 9.

16. The complex of any one of claims 5-11 and 15, wherein the sense strand is selected from the modified version of SEQ ID NOs: 3000, 3021, 2987, 2997, 2999, 3001, 3004, and 3012 listed in Table 9.

17. The complex of any one of claims 1-11 and 15-16, wherein the oligonucleotide is a siRNA molecule selected from the siRNAs listed in Table 9.

18.-23. (canceled)

24. The complex of any one of claims 1-23, wherein the muscle targeting agent and the antisense oligonucleotide are covalently linked via a linker, optionally wherein the linker comprises a valine-citrulline sequence.

25. A method of reducing DUX4 expression in a muscle cell, the method comprising contacting the muscle cell with an effective amount of the complex of any one of claims 1-24 for promoting internalization of the oligonucleotide to the muscle cell.

26. The method of claim 25, wherein reducing DUX4 expression comprises reducing DUX4 protein and/or mRNA levels.

27. A method of treating Facioscapulohumeral muscular dystrophy (FSHD), the method comprising administering to a subject in need thereof an effective amount of the complex of any one of claims 1-24, wherein the subject has aberrant production of DUX4 protein.

28. An oligonucleotide comprising an siRNA oligonucleotide selected from:
Antisense strand:
(SEQ ID NO: 3035)
5′-fCfUmCfUmCfAmUfUmCfUmGfAmAfAmCfCmAfAmAfUmC*fU*mG-3′
Sense strand:
(SEQ ID NO: 2995)
5′-mGmAfUmUfUmGfGmUfUmUfCmAfGmAfAmUfGmAfGmAfG-3′;
Antisense strand:
(SEQ ID NO: 3040)
5′-fUfGmGfAmAfAmGfCmGfAmUfCmCfUmUfCmUfCmAfAmA*fG*mG-3′
Sense strand:
(SEQ ID NO: 3000)
5′-mUmUfUmGfAmGfAmAfGmGfAmUfCmGfCmUfUmUfCmCfA-3′;
Antisense strand:
(SEQ ID NO: 3061)
5′-fCfCmGfGmUfAmUfUmCfUmUfCmCfUmCfGmCfUmGfAmG*fG*mG-3′
Sense strand:
(SEQ ID NO: 3021)
5′-mCmUfCmAfGmCfGmAfGmGfAmAfGmAfAmUfAmCfCmGfG-3′;
Antisense strand:
(SEQ ID NO: 3039)
5′-fCfGmAfUmCfCmUfUmCfUmCfAmAfAmGfGmCfUmCfGmG*fA*mG-3′
Sense strand:
(SEQ ID NO: 2999)
5′-mCmCfGmAfGmCfCmUfUmUfGmAfGmAfAmGfGmAfUmCfG-3′;
Antisense strand:
(SEQ ID NO: 3041)
5′-fGfCmGfAmUfGmCfCmUfGmGfAmAfAmGfCmGfAmUfCmC*fU*mU-3′
Sense strand:
(SEQ ID NO: 3001)
5′-mGmGfAmUfCmGfCmUfUmUfCmCfAmGfGmCfAmUfCmGfC-3′;
Antisense strand:
(SEQ ID NO: 3027)
5′-fGfUmCfCmAfAmAfCmGfAmGfUmCfUmCfCmGfUmCfGmC*fC*mG-3′
Sense strand:
(SEQ ID NO: 2987)
5′-mGmCfGmAfCmGfGmAfGmAfCmUfCmGfUmUfUmGfGmAfC-3′;
Antisense strand:
(SEQ ID NO: 3052)
5′-fUfUmCfUmAfGmGfAmGfAmGfGmUfUmGfCmGfCmCfUmG*fC*mU-3′
Sense strand:
(SEQ ID NO: 3012)
5′-mCmAfGmGfCmGfCmAfAmCfCmUfCmUfCmCfUmAfGmAfA-3′;
Antisense strand:
(SEQ ID NO: 3044)
5′-fCfUmGfAmAfUmCfCmUfGmGfAmCfUmCfCmGfGmGfAmG*fG*mC-3′
Sense strand:
(SEQ ID NO: 3004)
5′-mCmUfCmCfCmGfGmAfGmUfCmCfAmGfGmAfUmUfCmAfG-3′;
Antisense strand:
(SEQ ID NO: 3031)
5′-fUfCmCfGmCfUmCfAmAfAmGfCmAfGmGfCmUfCmGfCmA*fG*mG-3′
Sense strand:
(SEQ ID NO: 2991)
5′-mUmGfCmGfAmGfCmCfUmGfCmUfUmUfGmAfGmCfGmGfA-3′;
Antisense strand:
(SEQ ID NO: 3034)
5′-fAfCmCfAmAfAmUfCmUfGmGfAmCfCmCfUmGfGmGfCmU*fC*mC-3′
Sense strand:
(SEQ ID NO: 2994)
5′-mAmGfCmCfCmAfGmGfGmUfCmCfAmGfAmUfUmUfGmGfU-3′;
Antisense strand:
(SEQ ID NO: 3032)
5′-fGfGmAfAmUfGmCfCmGfAmUfGmGfCmCfUmGfGmGfCmC*fA*mG-3′
Sense strand:
(SEQ ID NO: 2992)
5′-mGmGfCmCfCmAfGmGfCmCfAmUfCmGfGmCfAmUfUmCfC-3′;
Antisense strand:
(SEQ ID NO: 3033)
5′-fCfAmAfAmUfCmUfGmGfAmCfCmCfUmGfGmGfCmUfCmC*fG*mG-3′
Sense strand:
(SEQ ID NO: 2993)
5′-mGmGfAmGfCmCfCmAfGmGfGmUfCmCfAmGfAmUfUmUfG-3′;
Antisense strand:
(SEQ ID NO: 3042)
5′-fGfGmAfCmUfCmCfGmGfGmAfGmGfCmCfCmGfUmCfUmC*fU*mC-3′
Sense strand:
(SEQ ID NO: 3002)
5′-mGmAfGmAfCmGfGmGfCmCfUmCfCmCfGmGfAmGfUmCfC-3′;
Antisense strand:
(SEQ ID NO: 3030)
5′-fCfUmCfAmAfAmGfCmAfGmGfCmUfCmGfCmAfGmGfGmC*fC*mU-3′
Sense strand:
(SEQ ID NO: 2990)
5′-mGmCfCmCfUmGfCmGfAmGfCmCfUmGfCmUfUmUfGmAfG-3′;
Antisense strand:
(SEQ ID NO: 3036)
5′-fAfUmUfCmCfCmGfCmCfGmGfUmGfCmUfGmCfCmUfCmA*fG*mC-3′
Sense strand:
(SEQ ID NO: 2996)
5′-mUmGfAmGfGmCfAmGfCmAfCmCfGmGfCmGfGmGfAmAfU-3′;
Antisense strand:
(SEQ ID NO: 3065)
5′-fAfUmGfCmCfCmAfGmGfAmAfAmGfAmAfUmGfGmCfAmG*fU*mU-3′
Sense strand:
(SEQ ID NO: 3025)
5′-mCmUfGmCfCmAfUmUfCmUfUmUfCmCfUmGfGmGfCmAfU-3′;
Antisense strand:
(SEQ ID NO: 3054)
5′-fGfUmUfUmCfUmAfGmGfAmGfAmGfGmUfUmGfCmGfCmC*fU*mG-3′
Sense strand:
(SEQ ID NO: 3014)
5′-mGmGfCmGfCmAfAmCfCmUfCmUfCmCfUmAfGmAfAmAfC-3′;
Antisense strand:
(SEQ ID NO: 3057)
5′-fUfCmCfGmUfUmUfCmUfAmGfGmAfGmAfGmGfUmUfGmC*fG*mC-3′
Sense strand:
(SEQ ID NO: 3017)
5′-mGmCfAmAfCmCfUmCfUmCfCmUfAmGfAmAfAmCfGmGfA-3′;
Antisense strand:
(SEQ ID NO: 3049)
5′-fGfAmAfAmCfUmCfCmGfGmGfCmUfCmGfCmCfAmGfGmA*fG*mC-3′
Sense strand:
(SEQ ID NO: 3009)
5′-mUmCfCmUfGmGfCmGfAmGfCmCfCmGfGmAfGmUfUmUfC-3′;
Antisense strand:
(SEQ ID NO: 3064)
5′-fAfAmGfAmAfUmGfGmCfAmGfUmUfCmUfCmCfGmCfGmG*fU*mG-3′
Sense strand:
(SEQ ID NO: 3024)
5′-mCmCfGmCfGmGfAmGfAmAfCmUfGmCfCmAfUmUfCmUfU-3′;
Antisense strand:
(SEQ ID NO: 3055)
5′-fCfGmUfUmUfCmUfAmGfGmAfGmAfGmGfUmUfGmCfGmC*fC*mU-3′
Sense strand:
(SEQ ID NO: 3015)
5′-mGmCfGmCfAmAfCmCfUmCfUmCfCmUfAmGfAmAfAmCfG-3′;
Antisense strand:
(SEQ ID NO: 3028)
5′-fGfGmUfCmCfAmAfAmCfGmAfGmUfCmUfCmCfGmUfCmG*fC*mC-3′
Sense strand:
(SEQ ID NO: 2988)
5′-mCmGfAmCfGmGfAmGfAmCfUmCfGmUfUmUfGmGfAmCfC-3′;
Antisense strand:
(SEQ ID NO: 3063)
5′-fGfCmGfGmUfGmUfGmGfAmGfUmCfUmCfUmCfAmCfCmG*fG*mG-3′
Sense strand:
(SEQ ID NO: 3023)
5′-mCmGfGmUfGmAfGmAfGmAfCmUfCmCfAmCfAmCfCmGfC-3′;
Antisense strand:
(SEQ ID NO: 3059)
5′-fUfAmUfUmCfUmUfCmCfUmCfGmCfUmGfAmGfGmGfGmU*fG*mC-3′
Sense strand:
(SEQ ID NO: 3019);
5′-mAmCfCmCfCmUfCmAfGmCfGmAfGmGfAmAfGmAfAmUfA-3′
Antisense strand:
(SEQ ID NO: 3029)
5′-fGfGmGfUmCfCmAfAmAfCmGfAmGfUmCfUmCfCmGfUmC*fG*mC-3′
Sense strand:
(SEQ ID NO: 2989)
5′-mGmAfCmGfGmAfGmAfCmUfCmGfUmUfUmGfGmAfCmCfC-3′;
Antisense strand:
(SEQ ID NO: 3053)
5′-fUfUmUfCmUfAmGfGmAfGmAfGmGfUmUfGmCfGmCfCmU*fG*mC-3′
Sense strand:
(SEQ ID NO: 3013)
5′-mAmGfGmCfGmCfAmAfCmCfUmCfUmCfCmUfAmGfAmAfA-3′;
Antisense strand:
(SEQ ID NO: 3050)
5′-fCfAmGfAmAfAmCfUmCfCmGfGmGfCmUfCmGfCmCfAmG*fG*mA-3′
Sense strand:
(SEQ ID NO: 3010)
5′-mCmUfGmGfCmGfAmGfCmCfCmGfGmAfGmUfUmUfCmUfG-3′;
Antisense strand:
(SEQ ID NO: 3038)
5′-fAfAmAfGmGfCmUfCmGfGmAfGmGfAmGfCmAfGmGfGmC*fG*mG-3′
Sense strand:
(SEQ ID NO: 2998)
5′-mGmCfCmCfUmGfCmUfCmCfUmCfCmGfAmGfCmCfUmUfU-3′;
Antisense strand:
(SEQ ID NO: 3047)
5′-fGfCmUfUmUfUmGfCmCfCmGfGmGfUmGfCmGfGmAfGmG*fC*mC-3′
Sense strand:
(SEQ ID NO: 3007);
5′-mCmCfUmCfCmGfCmAfCmCfCmGfGmGfCmAfAmAfAmGfC-3′
Antisense strand:
(SEQ ID NO: 3045)
5′-fCfCmUfGmUfCmCfCmGfGmGfUmGfCmCfUmGfGmCfCmC*fU*mU-3′
Sense strand:
(SEQ ID NO: 3005)
5′-mGmGfGmCfCmAfGmGfCmAfCmCfCmGfGmGfAmCfAmGfG-3′;
Antisense strand:
(SEQ ID NO: 3043)
5′-fUfGmAfAmUfCmCfUmGfGmAfCmUfCmCfGmGfGmAfGmG*fC*mC-3′
Sense strand:
(SEQ ID NO: 3003)
5′-mCmCfUmCfCmCfGmGfAmGfUmCfCmAfGmGfAmUfUmCfA-3′;
Antisense strand:
(SEQ ID NO: 3066)
5′-fGfGmGfAmUfGmCfCmCfAmGfGmAfAmAfGmAfAmUfGmG*fC*mA-3′
Sense strand:
(SEQ ID NO: 3026)
5′-mCmCfAmUfUmCfUmUfUmCfCmUfGmGfGmCfAmUfCmCfC-3′;
Antisense strand:
(SEQ ID NO: 3062)
5′-fGfAmGfUmCfUmCfUmCfAmCfCmGfGmGfCmCfUmAfGmA*fC*mC-3′
Sense strand:
(SEQ ID NO: 3022)
5′-mUmCfUmAfGmGfCmCfCmGfGmUfGmAfGmAfGmAfCmUfC-3′;
Antisense strand:
(SEQ ID NO: 3056)
5′-fCfCmGfUmUfUmCfUmAfGmGfAmGfAmGfGmUfUmGfCmG*fC*mC-3′
Sense strand:
(SEQ ID NO: 3016);
5′-mCmGfCmAfAmCfCmUfCmUfCmCfUmAfGmAfAmAfCmGfG-3′
Antisense strand:
(SEQ ID NO: 3048)
5′-fCfGmGfUmCfCmUfCmCfCmGfGmCfUmUfUmUfGmCfCmC*fG*mG-3′
Sense strand:
(SEQ ID NO: 3008)
5′-mGmGfGmCfAmAfAmAfGmCfCmGfGmGfAmGfGmAfCmCfG-3′;
Antisense strand:
(SEQ ID NO: 3046)
5′-fCfCmAfGmCfGmAfGmGfAmGfCmCfUmGfAmGfGmGfUmG*fG*mG-3′
Sense strand:
(SEQ ID NO: 3006)
5′-mCmAfCmCfCmUfCmAfGmGfCmUfCmCfUmCfGmCfUmGfG-3′;
Antisense strand:
(SEQ ID NO: 3058)
5′-fGfCmUfUmCfCmAfGmCfGmAfGmGfCmGfGmCfCmUfCmU*fU*mC-3′
Sense strand:
(SEQ ID NO: 3018)
5′-mAmGfAmGfGmCfCmGfCmCfUmCfGmCfUmGfGmAfAmGfC-3′;
Antisense strand:
(SEQ ID NO: 3037)
5′-fGfGmGfCmGfGmUfCmUfGmGfGmAfUmCfCmGfGmUfGmA*fC*mG-3′
Sense strand:
(SEQ ID NO: 2997)
5′-mUmCfAmCfCmGfGmAfUmCfCmCfAmGfAmCfCmGfCmCfC-3′;
Antisense strand:
(SEQ ID NO: 3060)
5′-fGfUmAfUmUfCmUfUmCfCmUfCmGfCmUfGmAfGmGfGmG*fU*mG-3′
Sense strand:
(SEQ ID NO: 3020)
5′-mCmCfCmCfUmCfAmGfCmGfAmGfGmAfAmGfAmAfUmAfC-3′;
and
Antisense strand:
(SEQ ID NO: 3051)
5′-fUfGmCfUmGfCmAfGmAfAmAfCmUfCmCfGmGfGmCfUmC*fG*mC-3′
Sense strand:
(SEQ ID NO: 3011)
5′-mGmAfGmCfCmCfGmGfAmGfUmUfUmCfUmGfCmAfGmCfA-3′;
wherein
“m” indicates a 2′-O-methyl (2′-O-Me) modified nucleoside;
“f” indicates a 2′-fluoro (2′-F) modified nucleoside;
“*” indicates phosphorothioate internucleoside linkage;
and the absence of “*” between two nucleosides indicate
phosphodiester internucleoside linkage.

29. An oligonucleotide comprising an siRNA oligonucleotide selected from:
Antisense strand:
(SEQ ID NO: 3040)
5′-fUfGmGfAmAfAmGfxCmGfAmUfCmCfUmUfCmUfCmAfAmA*fG*mG-3′
Sense strand:
(SEQ ID NO: 3000)
5′-mUmUfUmGfAmGfAmAfGmGfAmUfxCmGfCmUfUmUfCmCfA-3′;
Antisense strand:
(SEQ ID NO: 3061)
5′-fCfxCmGfGmUfAmUfUmCfUmUfCmCfUmxCfGmCfUmGfAmG*fG*mG-3′
Sense strand:
(SEQ ID NO: 3021)
5′-mCmUfCmAfGmxCfGmAfGmGfAmAfGmAfAmUfAmCfxCmGfG-3′;
Antisense strand:
(SEQ ID NO: 3027)
5′-fGfUmCfCmAfAmAfxCmGfAmGfUmCfUmCfxCmGfUmxCfGmC*fxC*mG-3′
Sense strand:
(SEQ ID NO: 2987)
5′-mGmxCfGmAfxCmGfGmAfGmAfCmUfxCmGfUmUfUmGfGmAfC-3′;
Antisense strand:
(SEQ ID NO: 3037)
5′-fGfGmGfxCmGfGmUfCmUfGmGfGmAfUmCfxCmGfGmUfGmA*fxC*mG-3′
Sense strand:
(SEQ ID NO: 2997)
5′-mUmCfAmCfxCmGfGmAfUmCfCmCfAmGfAmCfxCmGfCmCfC-3′;
Antisense strand:
(SEQ ID NO: 3039)
5′-fxCfGmAfUmCfCmUfUmCfUmCfAmAfAmGfGmCfUmxCfGmG*fA*mG-3′
Sense strand:
(SEQ ID NO: 2999)
5′-mCmxCfGmAfGmCfCmUfUmUfGmAfGmAfAmGfGmAfUmxCfG-3′;
Antisense strand:
(SEQ ID NO: 3041)
5′-fGfxCmGfAmUfGmCfCmUfGmGfAmAfAmGfxCmGfAmUfCmC*fU*mU-3′
Sense strand:
(SEQ ID NO: 3001)
5′-mGmGfAmUfxCmGfCmUfUmUfCmCfAmGfGmCfAmUfxCmGfC-3′;
Antisense strand:
(SEQ ID NO: 3044)
5′-fCfUmGfAmAfUmCfCmUfGmGfAmCfUmCfxCmGfGmGfAmG*fG*mC-3′
Sense strand:
(SEQ ID NO: 3004)
5′-mCmUfCmCfxCmGfGmAfGmUfCmCfAmGfGmAfUmUfCmAfG-3′;
and
Antisense strand:
(SEQ ID NO: 3052)
5′-fUfUmCfUmAfGmGfAmGfAmGfGmUfUmGfxCmGfCmCfUmG*fC*mU-3′
Sense strand:
(SEQ ID NO: 3012)
5′-mCmAfGmGfxCmGfCmAfAmCfCmUfCmUfCmCfUmAfGmAfA-3′;
wherein
“m” indicates a 2′-O-methyl (2′-O-Me) modified nucleoside;
“f” indicates a 2′-fluoro (2′-F) modified nucleoside;
“mxC” indicates 2′-O-Me modified 5-methyl-cytidine;
“fxC” indicates 2′-F modified 5-methyl-cytidine;
“*” indicates phosphorothioate internucleoside linkage;
and the absence of “*” between two nucleosides
indicate phosphodiester internucleoside linkage.

30. A complex comprising a muscle-targeting agent covalently linked to an oligonucleotide targeting a double homeobox 4 (DUX4) mRNA, wherein the oligonucleotide comprises an antisense strand of 18-25 nucleotides in length and comprises a region of complementarity to a target sequence as set forth in SEQ ID NOs: 163-1574, and wherein the region of complementarity is at least 16 consecutive nucleosides in length.

31. The complex of claim 30, wherein the muscle-targeting agent is an anti-transferrin receptor (TfR) antibody.

32. The complex of claim 30 or claim 31, wherein the oligonucleotide is an RNAi oligonucleotide.

33. The complex of any one of claims 30-32, wherein the antisense strand comprises the nucleotide sequence of any one of SEQ ID NOs: 1575-2986.
